(19) United States
(12) Patent Application Publication
(10) Pub. No.: US 2023/0338477 A1
(43) Pub. Date: Oct. 26, 2023

(54) ANTI-TFR:GAA AND ANTI-CD63:GAA INSERTION FOR TREATMENT OF POMPE DISEASE

(71) Applicant: Regeneron Pharmaceuticals, Inc., Tarrytown, NY (US)

(72) Inventors: Andrew Baik, Scarsdale, NY (US); Maria Praggastis, Cortlandt Manor, NY (US); Katherine Cygnar, New York, NY (US); Leah Sabin, Goldens Bridge, NY (US); Poulami Samai, New York, NY (US); Evangelos Pefanis, Somers, NY (US); Philip Calafati, Tarrytown, NY (US); Nicole Keating, Yorktown Heights, NY (US); Pascaline Aimé-Wilson, New York, NY (US); John Dugan, Hoboken, NJ (US); Min Gao, Woodcliff Lake, NJ (US); Robert Babb, River Edge, NJ (US); Anthony Forget, Cambridge, MA (US)

(21) Appl. No.: 18/163,698

(22) Filed: Feb. 2, 2023

Related U.S. Application Data
(60) Provisional application No. 63/369,902, filed on Jul. 29, 2022.
(60) Provisional application No. 63/306,040, filed on Feb. 2, 2022.

(51) Int. Cl. C07K 16/28; A61K 38/47; A61K 48/00; C12N 15/62; A61P 3/08; C12N 9/26

(52) U.S. Cl. CPC A61K 38/47; A61K 48/0066; A61P 3/08; C07K 16/2881; C07K 16/2896; C12N 9/2408; C12N 15/62; C12Y 302/0102; C07K 2317/622; C07K 2319/33; C12N 2310/20; C12N 2800/80

(57) ABSTRACT

Nucleic acid constructs and compositions that allow insertion of a multidomain therapeutic protein (e.g., GAA fusion protein) coding sequence into a target genomic locus such as an endogenous ALB locus and/or expression of the multidomain therapeutic protein (e.g., GAA fusion protein) coding sequence are also provided. The nucleic acid constructs and compositions can be used in methods of integration of a multidomain therapeutic protein (e.g., GAA fusion protein) nucleic acid into a target genomic locus, methods of expression of a multidomain therapeutic protein (e.g., GAA fusion protein) in a cell, methods of reducing glycogen accumulation, methods of treating Pompe disease or GAA deficiency in a subject, and method of preventing or reducing the onset of a sign or symptom of Pompe disease in a subject, including neonatal cells and subjects.

### CROSS-REFERENCE TO RELATED APPLICATIONS

[0001] This application claims the benefit of U.S. Application No. 63/306,040, filed Feb. 2, 2022, and U.S. Application No. 63/369,902, filed Jul. 29, 2022, each of which is herein incorporated by reference in its entirety for all purposes.

### REFERENCE TO A SEQUENCE LISTING SUBMITTED AS AN XML FILE VIA EFS WEB

[0002] The Sequence Listing written in file 590205SEQLIST.xml is 1.16 megabytes, was created on Feb. 2, 2023, and is hereby incorporated by reference.

### BACKGROUND

[0003] Gene therapy has long been recognized for its enormous potential in how human diseases are approached and treated. Instead of relying on drugs or surgery, patients with underlying genetic factors can be treated by directly targeting the underlying cause. Furthermore, by targeting the underlying genetic cause, gene therapy can provide the potential to effectively cure patients. However, clinical applications of gene therapy approaches still require improvement in several aspects. In addition, treatment early in life can present additional hurdles due to the unique environment in neonatal patients.

[0004] Pompe disease (PD), or glycogen storage disease type II, is a monogenic, lysosomal disease caused by a deficiency in the activity of the enzyme lysosomal acid alpha-glucosidase (GAA). GAA deficiency results in an accumulation of its substrate, glycogen, in the lysosomes of cells in tissues including skeletal and cardiac muscle. This aberrant accumulation of glycogen in myofibers results in progressive damage of muscle tissue, with symptoms that can include cardiomegaly, mild to profound muscle weakness, and ultimately death due to cardiac or respiratory failure. Infantile onset PD (IOPD) is associated with GAA activity of <1% of normal. It is severe and affects visceral organs, muscles, and the central nervous system (CNS). Late onset PD (LOPD) is associated with GAA activity of 2-40%. It is less severe, with primarily respiratory and skeletal muscle involvement.

[0005] The only approved therapy for PD is enzyme replacement therapy (ERT). Recombinant human (rh) GAA is delivered by intravenous infusion into patients every other week. While ERT has been very successful in treating the cardiac manifestations of PD, skeletal muscle and the CNS remain minimally treated by ERT. The primary mechanism by which rhGAA reaches lysosomes is through uptake by the cation-independent mannose 6-phosphate (M6P) receptor (CIMPR), which binds M6P on rhGAA. However, CI-MPR expression in skeletal muscle is very low, and rhGAA is poorly mannose 6-phosphorylated. In addition, CI-MPR may be misdirected into autophagosomes in affected cells, rather than lysosomes, while a large amount of the drug is also taken up by the liver, an organ that does not have primary pathology in PD. The ERT does not cross the blood-brain-barrier. In addition, PD can require treatment early in life, which presents additional hurdles due to the unique environment in neonatal and juvenile patients.

### SUMMARY

[0006] Nucleic acid constructs and compositions that allow insertion of a multidomain therapeutic protein (e.g., GAA fusion protein) coding sequence into a target genomic locus such as an endogenous ALB locus and/or expression of the multidomain therapeutic protein (e.g., GAA fusion protein) coding sequence are provided. The nucleic acid constructs and compositions can be used in methods of integrating or inserting a multidomain therapeutic protein (e.g., GAA fusion protein) nucleic acid into a target genomic locus in a cell or a population of cells or a subject, methods of expressing a multidomain therapeutic protein (e.g., GAA fusion protein) in a cell or a population of cells or a subject, methods of reducing glycogen accumulation in a cell or a population of cells or a subject, and methods of treating Pompe disease or GAA deficiency in a subject, and method of preventing or reducing the onset of a sign or symptom of Pompe disease in a subject such as subjects with reduced GAA activity or expression and in a subject diagnosed with Pompe disease, including neonatal subjects. In some embodiments the cell, population of cells, or subject is a neonatal cell, a neonatal population of cells, or a neonatal subject.

[0007] In one aspect, provided are methods of inserting a nucleic acid encoding a multidomain therapeutic protein comprising a delivery domain fused to a lysosomal alpha-glucosidase into a target genomic locus in a neonatal cell or a population of neonatal cells, optionally wherein the delivery domain is a CD63-binding delivery domain or a TfR-binding delivery domain. Some such methods comprise administering to the neonatal cell or the population of neonatal cells: (a) a nucleic acid construct comprising a coding sequence for the multidomain therapeutic protein comprising the delivery domain fused to the lysosomal alpha-glucosidase, optionally wherein the delivery domain is a CD63-binding delivery domain or a TfR-binding delivery domain; and (b) a nuclease agent or one or more nucleic acids encoding the nuclease agent, wherein the nuclease agent targets a nuclease target site in the target genomic locus, wherein the nuclease agent cleaves the nuclease target site, and the nucleic acid construct is inserted into the target genomic locus. In one aspect, provided are methods of inserting a nucleic acid encoding a multidomain therapeutic protein comprising a CD63-binding delivery domain fused to a lysosomal alpha-glucosidase into a target genomic locus in a neonatal cell or a population of neonatal cells. Some such methods comprise administering to the neonatal cell or the population of neonatal cells: (a) a nucleic acid construct comprising a coding sequence for the multidomain therapeutic protein comprising the CD63-binding delivery domain fused to the lysosomal alpha-glucosidase; and (b) a nuclease agent or one or more nucleic acids encoding the nuclease agent, wherein the nuclease agent targets a nuclease target site in the target genomic locus, wherein the nuclease agent cleaves the nuclease target site, and the nucleic acid construct is inserted into the target genomic locus. In another aspect, provided are methods of expressing a multidomain therapeutic protein comprising a delivery domain fused to a lysosomal alpha-glucosidase in a neonatal cell or a population of neonatal cells, optionally wherein the delivery domain is a CD63-binding delivery domain or a TfR-binding delivery domain. In another aspect, provided are methods of expressing a multidomain therapeutic protein comprising a delivery domain fused to a lysosomal alpha-glucosidase from a target genomic locus in a neonatal cell or a population of neonatal cells, optionally wherein the delivery domain is a CD63-binding delivery domain or a TfR-binding delivery domain. Some such methods comprise administering to the neonatal cell or the population of neonatal cells: (a) a nucleic acid construct comprising a coding sequence for the multidomain therapeutic protein comprising the delivery domain fused to the lysosomal alpha-glucosidase, optionally wherein the delivery domain is a CD63-binding delivery domain or a TfR-binding delivery domain; and (b) a nuclease agent or one or more nucleic acids encoding the nuclease agent, wherein the nuclease agent targets a nuclease target site in the target genomic locus, wherein the nuclease agent cleaves the nuclease target site, the nucleic acid construct is inserted into the target genomic locus to create a modified target genomic locus, and the multidomain therapeutic protein comprising the delivery domain fused to the lysosomal alpha-glucosidase is expressed from the modified target genomic locus. In another aspect, provided are methods of expressing a multidomain therapeutic protein comprising a CD63-binding delivery domain fused to a lysosomal alpha-glucosidase in a neonatal cell or a population of neonatal cells. In another aspect, provided are methods of expressing a multidomain therapeutic protein comprising a CD63-binding delivery domain fused to a lysosomal alpha-glucosidase from a target genomic locus in a neonatal cell or a population of neonatal cells. Some such methods comprise administering to the neonatal cell or the population of neonatal cells: (a) a nucleic acid construct comprising a coding sequence for the multidomain therapeutic protein comprising the CD63-binding delivery domain fused to the lysosomal alpha-glucosidase; and (b) a nuclease agent or one or more nucleic acids encoding the nuclease agent, wherein the nuclease agent targets a nuclease target site in the target genomic locus, wherein the nuclease agent cleaves the nuclease target site, the nucleic acid construct is inserted into the target genomic locus to create a modified target genomic locus, and the multidomain therapeutic protein comprising the CD63-binding delivery domain fused to the lysosomal alpha-glucosidase is expressed from the modified target genomic locus. In some such methods, the neonatal cell is a liver cell or the population of neonatal cells is a population of liver cells. In some such methods, the neonatal cell is a hepatocyte or the population of neonatal cells is a population of hepatocytes. In some such methods, the neonatal cell is a human cell or the population of neonatal cells is a population of human cells. In some such methods, the neonatal cell or the population of neonatal cells is from a human neonatal subject within 24 weeks after birth. In some such methods, the neonatal cell or the population of neonatal cells is from a human neonatal subject within 12 weeks after birth. In some such methods, the neonatal cell or the population of neonatal cells is from a human neonatal subject within 8 weeks after birth. In some such methods, the neonatal cell or the population of neonatal cells is from a human neonatal subject within 4 weeks after birth. In some such methods, the neonatal cell is in vitro or ex vivo or the population of neonatal cells is in vitro or ex vivo. In some such methods, the neonatal cell is in vivo in a neonatal subject or the population of neonatal cells is in vivo in a neonatal subject.

[0008] In another aspect, provided are methods of inserting a nucleic acid encoding a multidomain therapeutic protein comprising a delivery domain fused to a lysosomal alpha-glucosidase into a target genomic locus in a neonatal cell or a population of neonatal cells in a neonatal subject, optionally wherein the delivery domain is a CD63-binding delivery domain or a TfR-binding delivery domain. Some such methods comprise administering to the neonatal subject: (a) a nucleic acid construct comprising a coding sequence for the multidomain therapeutic protein comprising the delivery domain fused to the lysosomal alpha-glucosidase, optionally wherein the delivery domain is a CD63-binding delivery domain or a TfR-binding delivery domain; and (b) a nuclease agent or one or more nucleic acids encoding the nuclease agent, wherein the nuclease agent targets a nuclease target site in the target genomic locus, wherein the nuclease agent cleaves the nuclease target site, and the nucleic acid construct is inserted into the target genomic locus. In another aspect, provided are methods of inserting a nucleic acid encoding a multidomain therapeutic protein comprising a CD63-binding delivery domain fused to a lysosomal alpha-glucosidase into a target genomic locus in a neonatal cell or a population of neonatal cells in a neonatal subject. Some such methods comprise administering to the neonatal subject: (a) a nucleic acid construct comprising a coding sequence for the multidomain therapeutic protein comprising the CD63-binding delivery domain fused to the lysosomal alpha-glucosidase; and (b) a nuclease agent or one or more nucleic acids encoding the nuclease agent, wherein the nuclease agent targets a nuclease target site in the target genomic locus, wherein the nuclease agent cleaves the nuclease target site, and the nucleic acid construct is inserted into the target genomic locus. In another aspect, provided are methods of expressing a multidomain therapeutic protein comprising a delivery domain fused to a lysosomal alpha-glucosidase protein in a neonatal cell or a population of neonatal cells in a neonatal subject, optionally wherein the delivery domain is a CD63-binding delivery domain or a TfR-binding delivery domain. In another aspect, provided are methods of expressing a multidomain therapeutic protein comprising a delivery domain fused to a lysosomal alpha-glucosidase protein from a target genomic locus in a neonatal cell or a population of neonatal cells in a neonatal subject, optionally wherein the delivery domain is a CD63-binding delivery domain or a TfR-binding delivery domain. Some such methods comprise administering to the neonatal subject: (a) a nucleic acid construct comprising a coding sequence for the multidomain therapeutic protein comprising the delivery domain fused to the lysosomal alpha-glucosidase, optionally wherein the delivery domain is a CD63-binding delivery domain or a TfR-binding delivery domain; and (b) a nuclease agent or one or more nucleic acids encoding the nuclease agent, wherein the nuclease agent targets a nuclease target site in the target genomic locus, wherein the nuclease agent cleaves the nuclease target site, the nucleic acid construct is inserted into the target genomic locus to create a modified target genomic locus, and the multidomain therapeutic protein comprising the delivery domain fused to the lysosomal alpha-glucosidase is expressed from the modified target genomic locus. In another aspect, provided are methods of expressing a multidomain therapeutic protein comprising a CD63-binding delivery domain fused to a lysosomal alpha-glucosidase protein in a neonatal cell or a population of neonatal cells in a neonatal subject. In another aspect, provided are methods of expressing a multidomain therapeutic protein comprising a CD63-binding delivery domain fused to a lysosomal alpha-glucosidase protein from a target genomic locus in a neonatal cell or a population of neonatal cells in a neonatal subject. Some such methods comprise administering to the neonatal subject: (a) a nucleic acid construct comprising a coding sequence for the multidomain therapeutic protein comprising the CD63-binding delivery domain fused to the lysosomal alpha-glucosidase; and (b) a nuclease agent or one or more nucleic acids encoding the nuclease agent, wherein the nuclease agent targets a nuclease target site in the target genomic locus, wherein the nuclease agent cleaves the nuclease target site, the nucleic acid construct is inserted into the target genomic locus to create a modified target genomic locus, and the multidomain therapeutic protein comprising the CD63-binding delivery domain fused to the lysosomal alpha-glucosidase is expressed from the modified target genomic locus. In some such methods, the expressed multidomain therapeutic protein is delivered to and internalized by skeletal muscle and heart tissue in the subject. In some such methods, the neonatal cell is a liver cell or the population of neonatal cells is a population of liver cells. In some such methods, the neonatal cell is a hepatocyte or the population of neonatal cells is a population of hepatocytes. In some such methods, the neonatal cell is a human cell or the population of neonatal cells is a population of human cells. In some such methods, the subject has Pompe disease.

[0009] In another aspect, provided are methods of treating a lysosomal alpha-glucosidase deficiency in a neonatal subject in need thereof. Some such methods comprise administering to the neonatal subject: (a) a nucleic acid construct comprising a coding sequence for a multidomain therapeutic protein comprising a delivery domain fused to a lysosomal alpha-glucosidase, optionally wherein the delivery domain is a CD63-binding delivery domain or a TfR-binding delivery domain; and (b) a nuclease agent or one or more nucleic acids encoding the nuclease agent, wherein the nuclease agent targets a nuclease target site in a target genomic locus, wherein the nuclease agent cleaves the nuclease target site, the nucleic acid construct is inserted into the target genomic locus to create a modified target genomic locus, and the multidomain therapeutic protein comprising the delivery domain fused to the lysosomal alpha-glucosidase is expressed from the modified target genomic locus. Some such methods comprise administering to the neonatal subject: (a) a nucleic acid construct comprising a coding sequence for a multidomain therapeutic protein comprising a CD63-binding delivery domain fused to a lysosomal alpha-glucosidase; and (b) a nuclease agent or one or more nucleic acids encoding the nuclease agent, wherein the nuclease agent targets a nuclease target site in a target genomic locus, wherein the nuclease agent cleaves the nuclease target site, the nucleic acid construct is inserted into the target genomic locus to create a modified target genomic locus, and the multidomain therapeutic protein comprising the CD63-binding delivery domain fused to the lysosomal alpha-glucosidase is expressed from the modified target genomic locus. In another aspect, provided are methods of reducing glycogen accumulation in a tissue in a neonatal subject in need thereof. Some such methods comprise administering to the neonatal subject: (a) a nucleic acid construct comprising a coding sequence for a multidomain therapeutic protein comprising a delivery domain fused a lysosomal alpha-glucosidase, optionally wherein the delivery domain is a CD63-binding delivery domain or a TfR-binding delivery domain; and (b) a nuclease agent or one or more nucleic acids encoding the nuclease agent, wherein the nuclease agent targets a nuclease target site in a target genomic locus, wherein the nuclease agent cleaves the nuclease target site, the nucleic acid construct is inserted into the target genomic locus to create a modified target genomic locus, and the multidomain therapeutic protein comprising the delivery domain fused to the lysosomal alpha-glucosidase is expressed from the modified target genomic locus and reduces glycogen accumulation in the tissue. Some such methods comprise administering to the neonatal subject: (a) a nucleic acid construct comprising a coding sequence for a multidomain therapeutic protein comprising a CD63-binding delivery domain fused a lysosomal alpha-glucosidase; and (b) a nuclease agent or one or more nucleic acids encoding the nuclease agent, wherein the nuclease agent targets a nuclease target site in a target genomic locus, wherein the nuclease agent cleaves the nuclease target site, the nucleic acid construct is inserted into the target genomic locus to create a modified target genomic locus, and the multidomain therapeutic protein comprising the CD63-binding delivery domain fused to the lysosomal alpha-glucosidase is expressed from the modified target genomic locus and reduces glycogen accumulation in the tissue. In some such methods, the subject has Pompe disease. In another aspect, provided are methods of treating Pompe disease in a neonatal subject in need thereof. Some such methods comprise administering to the neonatal subject: (a) a nucleic acid construct comprising a coding sequence for a multidomain therapeutic protein comprising a delivery domain fused to a lysosomal alpha-glucosidase, optionally wherein the delivery domain is a CD63-binding delivery domain or a TfR-binding delivery domain; and (b) a nuclease agent or one or more nucleic acids encoding the nuclease agent, wherein the nuclease agent targets a nuclease target site in a target genomic locus, wherein the nuclease agent cleaves the nuclease target site, the nucleic acid construct is inserted into the target genomic locus to create a modified target genomic locus, and the multidomain therapeutic protein comprising the delivery domain fused to the lysosomal alpha-glucosidase is expressed from the modified target genomic locus, thereby treating the Pompe disease. Some such methods comprise administering to the neonatal subject: (a) a nucleic acid construct comprising a coding sequence for a multidomain therapeutic protein comprising a CD63-binding delivery domain fused to a lysosomal alpha-glucosidase; and (b) a nuclease agent or one or more nucleic acids encoding the nuclease agent, wherein the nuclease agent targets a nuclease target site in a target genomic locus, wherein the nuclease agent cleaves the nuclease target site, the nucleic acid construct is inserted into the target genomic locus to create a modified target genomic locus, and the multidomain therapeutic protein comprising the CD63-binding delivery domain fused to the lysosomal alpha-glucosidase is expressed from the modified target genomic locus, thereby treating the Pompe disease. In some such methods, the Pompe disease is infantile-onset Pompe disease. In some such methods, the method results in a therapeutically effective level of circulating multidomain therapeutic protein or lysosomal alpha-glucosidase in the subject. In some such methods, the method reduces glycogen accumulation in skeletal muscle, heart, or central nervous system tissue in the subject. In some such methods, the method reduces glycogen accumulation in skeletal muscle and heart tissue in the subject. In some such methods, the method results in reduced glycogen levels in skeletal muscle and/or heart tissue in the subject comparable to wild type levels at the same age. In some such methods, the method improves muscle strength in the subject or prevents loss of muscle strength in the subject compared to a control subject. In some such methods, the method results in the subject having muscle strength comparable to wild type levels at the same age.

[0010] In another aspect, provided are methods of preventing or reducing the onset of a sign or symptom of Pompe disease in a neonatal subject in need thereof. Some such methods comprise administering to the neonatal subject: (a) a nucleic acid construct comprising a coding sequence for a multidomain therapeutic protein comprising a delivery domain fused to a lysosomal alpha-glucosidase, optionally wherein the delivery domain is a CD63-binding delivery domain or a TfR-binding delivery domain; and (b) a nuclease agent or one or more nucleic acids encoding the nuclease agent, wherein the nuclease agent targets a nuclease target site in a target genomic locus, wherein the nuclease agent cleaves the nuclease target site, the nucleic acid construct is inserted into the target genomic locus to create a modified target genomic locus, and the multidomain therapeutic protein comprising the delivery domain fused to the lysosomal alpha-glucosidase is expressed from the modified target genomic locus, thereby preventing or reducing the onset of a sign or symptom of the Pompe disease in the subject. Some such methods comprise administering to the neonatal subject: (a) a nucleic acid construct comprising a coding sequence for a multidomain therapeutic protein comprising a CD63-binding delivery domain fused to a lysosomal alpha-glucosidase; and (b) a nuclease agent or one or more nucleic acids encoding the nuclease agent, wherein the nuclease agent targets a nuclease target site in a target genomic locus, wherein the nuclease agent cleaves the nuclease target site, the nucleic acid construct is inserted into the target genomic locus to create a modified target genomic locus, and the multidomain therapeutic protein comprising the CD63-binding delivery domain fused to the lysosomal alpha-glucosidase is expressed from the modified target genomic locus, thereby preventing or reducing the onset of a sign or symptom of the Pompe disease in the subject. In some such methods, the Pompe disease is infantile-onset Pompe disease. In some such methods, the Pompe disease is late-onset Pompe disease. In some such methods, the method results in a therapeutically effective level of circulating multidomain therapeutic protein or lysosomal alpha-glucosidase in the subject. In some such methods, the method prevents or reduces glycogen accumulation in skeletal muscle, heart, or central nervous system tissue in the subject. In some such methods, the method prevents or reduces glycogen accumulation in skeletal muscle and heart tissue in the subject.

[0011] In some such methods, the neonatal subject is a human subject within 24 weeks after birth. In some such methods, the neonatal subject is a human subject within 12 weeks after birth. In some such methods, the neonatal subject is a human subject within 8 weeks after birth. In some such methods, the neonatal subject is a human subject within 4 weeks after birth.

[0012] In some such methods, the method results in increased expression of the multidomain therapeutic protein in the subject compared to a method comprising administering an episomal expression vector encoding the multidomain therapeutic protein to a control subject. In some such methods, the method results in increased serum levels of the multidomain therapeutic protein in the subject compared to a method comprising administering an episomal expression vector encoding the multidomain therapeutic protein to a control subject. In some such methods, the method results in serum levels of the multidomain therapeutic protein in the subject of at least about 1 µg/mL, at least about 2 µg/mL, at least about 3 µg/mL, at least about 4 µg/mL, at least about 5 µg/mL, at least about 6 µg/mL, at least about 7 µg/mL, at least about 8 µg/mL, at least about 9 µg/mL, or at least about 10 µg/mL. In some such methods, the method results in serum levels of the multidomain therapeutic protein in the subject of at least about 2 µg/mL or at least about 5 µg/mL. In some such methods, the method results in serum levels of the multidomain therapeutic protein in the subject of between about 2 µg/mL and about 30 µg/mL or between about 2 µg/mL and about 20 µg/mL. In some such methods, the method results in serum levels of the multidomain therapeutic protein in the subject of between about 5 µg/mL and about 30 µg/mL or between about 5 µg/mL and about 20 µg/mL. In some such methods, the method achieves lysosomal alpha-glucosidase activity levels of at least about 40% of normal, at least about 45% of normal, at least about 50%, at least about 60%, at least about 70%, at least about 80%, at least about 90%, or 100% of normal. In some such methods, the subject has infantile-onset Pompe disease, and the method achieves lysosomal alpha-glucosidase activity levels of at least about 1% or more than about 1% of normal; or . In some such methods, the subject has late-onset Pompe disease, and the method achieves lysosomal alpha-glucosidase activity levels of at least about 40% of normal, or more than about 40% of normal. In some such methods, the method increases lysosomal alpha-glucosidase activity over the subject’s baseline lysosomal alpha-glucosidase activity by at least about 1%, at least about 5%, at least about 10%, at least about 15%, at least about 20%, at least about 25%, at least about 30%, at least about 35%, at least about 40%, at least about 45%, at least about 50%, at least about 60%, at least about 70%, at least about 80%, at least about 90%, or at least about 100%. In some such methods, the expression or activity of the multidomain therapeutic protein is at least 50% of the expression or activity of the multidomain therapeutic protein at a peak level of expression measured for the subject at six months after the administering. In some such methods, the expression or activity of the multidomain therapeutic protein is at least 50% of the expression or activity of the multidomain therapeutic protein at a peak level of expression measured for the subject at one year after the administering. In some such methods, the expression or activity of the multidomain therapeutic protein is at least 60% of the expression or activity of the multidomain therapeutic protein at a peak level of expression measured for the subject at six months after the administering. In some such methods, the expression or activity of the multidomain therapeutic protein is at least 50% of the expression or activity of the multidomain therapeutic protein at a peak level of expression measured for the subject at two years after the administering. In some such methods, the expression or activity of the multidomain therapeutic protein is at least 60% of the expression or activity of the multidomain therapeutic protein at a peak level of expression measured for the subject at two years after the administering. In some such methods, the expression or activity of the multidomain therapeutic protein is at least 60% of the expression or activity of the multidomain therapeutic protein at a peak level of expression measured for the subject at six months after the administering.

[0013] In some such methods, the subject is a human subject.

[0014] In some such methods, the method further comprises assessing preexisting AAV immunity in the neonatal subject prior to administering the nucleic acid construct to the subject. In some such methods, the preexisting AAV immunity is preexisting AAV8 immunity. In some such methods, assessing preexisting AAV immunity comprises assessing immunogenicity using a total antibody immune assay or a neutralizing antibody assay.

[0015] In some such methods, the nucleic acid construct is administered simultaneously with the nuclease agent or the one or more nucleic acids encoding the nuclease agent. In some such methods, the nucleic acid construct is not administered simultaneously with the nuclease agent or the one or more nucleic acids encoding the nuclease agent. In some such methods, the nucleic acid construct is administered prior to the nuclease agent or the one or more nucleic acids encoding the nuclease agent. In some such methods, the nucleic acid construct is administered after the nuclease agent or the one or more nucleic acids encoding the nuclease agent.

[0016] In some such methods, the CD63-binding delivery domain is fused to the lysosomal alpha-glucosidase protein via a peptide linker. In some such methods, the coding sequence for the CD63-binding delivery domain is codon-optimized or CpG-depleted. In some such methods, the coding sequence for the CD63-binding delivery domain is codon-optimized and CpG-depleted. In some such methods, the CD63-binding delivery domain comprises an anti-CD63 antigen-binding protein. In some such methods, the CD63-binding delivery domain comprises an anti-CD63 antibody, antibody fragment, or single-chain variable fragment (scFv). In some such methods, the CD63-binding delivery domain is the single-chain variable fragment (scFv). In some such methods, the scFv comprises the sequence set forth in SEQ ID NO: 183. In some such methods, the scFv consists of the sequence set forth in SEQ ID NO: 183. In some such methods, the scFv coding sequence is at least 90%, at least 91%, at least 92%, at least 93%, at least 94%, at least 95%, at least 96%, at least 97%, at least 98%, or at least 99% identical to any one of SEQ ID NOS: 184-192, optionally wherein the scFv coding sequence is at least 90%, at least 91%, at least 92%, at least 93%, at least 94%, at least 95%, at least 96%, at least 97%, at least 98%, or at least 99% identical to SEQ ID NO: 186. In some such methods, the scFv coding sequence is at least 90%, at least 91%, at least 92%, at least 93%, at least 94%, at least 95%, at least 96%, at least 97%, at least 98%, or at least 99% identical to any one of SEQ ID NOS: 184-192 and encodes an scFv comprising SEQ ID NO: 183, optionally wherein the scFv coding sequence is at least 90%, at least 91%, at least 92%, at least 93%, at least 94%, at least 95%, at least 96%, at least 97%, at least 98%, or at least 99% identical to SEQ ID NO: 186 and encodes an scFv comprising SEQ ID NO: 183. In some such methods, the scFv coding sequence is at least 90%, at least 91%, at least 92%, at least 93%, at least 94%, at least 95%, at least 96%, at least 97%, at least 98%, or at least 99% identical to any one of SEQ ID NOS: 184-192, is codon-optimized and CpG-depleted, and encodes an scFv comprising SEQ ID NO: 183, optionally wherein the scFv coding sequence is at least 90%, at least 91%, at least 92%, at least 93%, at least 94%, at least 95%, at least 96%, at least 97%, at least 98%, or at least 99% identical to SEQ ID NO: 186, is codon-optimized and CpG-depleted, and encodes an scFv comprising SEQ ID NO: 183. In some such methods, the scFv coding sequence comprises the sequence set forth in any one of SEQ ID NOS: 184-192, optionally wherein the scFv coding sequence comprises the sequence set forth in SEQ ID NO: 186. In some such methods, the scFv coding sequence consists of the sequence set forth in any one of SEQ ID NOS: 184-192, optionally wherein the scFv coding sequence consists of the sequence set forth in SEQ ID NO: 186.

[0017] In some such methods, the lysosomal alpha-glucosidase lacks the lysosomal alpha-glucosidase signal peptide and propeptide. In some such methods, the lysosomal alpha-glucosidase comprises the sequence set forth in SEQ ID NO: 173. In some such methods, the lysosomal alpha-glucosidase consists of the sequence set forth in SEQ ID NO: 173. In some such methods, the lysosomal alpha-glucosidase coding sequence is codon-optimized or CpG-depleted. In some such methods, the lysosomal alpha-glucosidase coding sequence is codon-optimized and CpG-depleted. In some such methods, the lysosomal alpha-glucosidase coding sequence is at least 90%, at least 91%, at least 92%, at least 93%, at least 94%, at least 95%, at least 96%, at least 97%, at least 98%, or at least 99% identical to any one of SEQ ID NOS: 174-182 and 205-212, optionally wherein the lysosomal alpha-glucosidase coding sequence is at least 90%, at least 91%, at least 92%, at least 93%, at least 94%, at least 95%, at least 96%, at least 97%, at least 98%, or at least 99% identical to SEQ ID NO: 176. In some such methods, the lysosomal alpha-glucosidase coding sequence is at least 90%, at least 91%, at least 92%, at least 93%, at least 94%, at least 95%, at least 96%, at least 97%, at least 98%, or at least 99% identical to any one of SEQ ID NOS: 174-182 and 205-212 and encodes a lysosomal alpha-glucosidase protein comprising SEQ ID NO: 173, optionally wherein the lysosomal alpha-glucosidase coding sequence is at least 90%, at least 91%, at least 92%, at least 93%, at least 94%, at least 95%, at least 96%, at least 97%, at least 98%, or at least 99% identical to SEQ ID NO: 176 and encodes a lysosomal alpha-glucosidase protein comprising SEQ ID NO: 173. In some such methods, the lysosomal alpha-glucosidase coding sequence is at least 90%, at least 91%, at least 92%, at least 93%, at least 94%, at least 95%, at least 96%, at least 97%, at least 98%, or at least 99% identical to any one of SEQ ID NOS: 174-182 and 205-212, is codon-optimized and CpG-depleted, and encodes a lysosomal alpha-glucosidase protein comprising SEQ ID NO: 173, optionally wherein the lysosomal alpha-glucosidase coding sequence is at least 90%, at least 91%, at least 92%, at least 93%, at least 94%, at least 95%, at least 96%, at least 97%, at least 98%, or at least 99% identical to SEQ ID NO: 176, is codon-optimized and CpG-depleted, and encodes a lysosomal alpha-glucosidase protein comprising SEQ ID NO: 173. In some such methods, the lysosomal alpha-glucosidase coding sequence comprises the sequence set forth in any one of SEQ ID NOS: 174-182 and 205-212, optionally wherein the lysosomal alpha-glucosidase coding sequence comprises the sequence set forth in SEQ ID NO: 176. In some such methods, the lysosomal alpha-glucosidase coding sequence consists of the sequence set forth in any one of SEQ ID NOS: 174-182 and 205-212, optionally wherein the lysosomal alpha-glucosidase coding sequence consists of the sequence set forth in SEQ ID NO: 176.

[0018] In some such methods, the lysosomal alpha-glucosidase lacks the lysosomal alpha-glucosidase signal peptide and propeptide. In some such methods, the lysosomal alpha-glucosidase comprises the sequence set forth in SEQ ID NO: 173. In some such methods, the lysosomal alpha-glucosidase consists of the sequence set forth in SEQ ID NO: 173. In some such methods, the lysosomal alpha-glucosidase coding sequence is codon-optimized or CpG-depleted. In some such methods, the lysosomal alpha-glucosidase coding sequence is codon-optimized and CpG-depleted. In some such methods, the lysosomal alpha-glucosidase coding sequence is at least 90%, at least 91%, at least 92%, at least 93%, at least 94%, at least 95%, at least 96%, at least 97%, at least 98%, or at least 99% identical to any one of SEQ ID NOS: 174-182, optionally wherein the lysosomal alpha-glucosidase coding sequence is at least 90%, at least 91%, at least 92%, at least 93%, at least 94%, at least 95%, at least 96%, at least 97%, at least 98%, or at least 99% identical to SEQ ID NO: 176. In some such methods, the lysosomal alpha-glucosidase coding sequence is at least 90%, at least 91%, at least 92%, at least 93%, at least 94%, at least 95%, at least 96%, at least 97%, at least 98%, or at least 99% identical to any one of SEQ ID NOS: 174-182 and encodes a lysosomal alpha-glucosidase protein comprising SEQ ID NO: 173, optionally wherein the lysosomal alpha-glucosidase coding sequence is at least 90%, at least 91%, at least 92%, at least 93%, at least 94%, at least 95%, at least 96%, at least 97%, at least 98%, or at least 99% identical to SEQ ID NO: 176 and encodes a lysosomal alpha-glucosidase protein comprising SEQ ID NO: 173. In some such methods, the lysosomal alpha-glucosidase coding sequence is at least 90%, at least 91%, at least 92%, at least 93%, at least 94%, at least 95%, at least 96%, at least 97%, at least 98%, or at least 99% identical to any one of SEQ ID NOS: 174-182, is codon-optimized and CpG-depleted, and encodes a lysosomal alpha-glucosidase protein comprising SEQ ID NO: 173, optionally wherein the lysosomal alpha-glucosidase coding sequence is at least 90%, at least 91%, at least 92%, at least 93%, at least 94%, at least 95%, at least 96%, at least 97%, at least 98%, or at least 99% identical to SEQ ID NO: 176, is codon-optimized and CpG-depleted, and encodes a lysosomal alpha-glucosidase protein comprising SEQ ID NO: 173. In some such methods, the lysosomal alpha-glucosidase coding sequence comprises the sequence set forth in any one of SEQ ID NOS: 174-182, optionally wherein the lysosomal alpha-glucosidase coding sequence comprises the sequence set forth in SEQ ID NO: 176. In some such methods, the lysosomal alpha-glucosidase coding sequence consists of the sequence set forth in any one of SEQ ID NOS: 174-182, optionally wherein the lysosomal alpha-glucosidase coding sequence consists of the sequence set forth in SEQ ID NO: 176.

[0019] In some such methods, the coding sequence for the multidomain therapeutic protein is codon-optimized or CpG-depleted. In some such methods, the coding sequence for the multidomain therapeutic protein is codon-optimized and CpG-depleted. In some such methods, the multidomain therapeutic protein comprises the sequence set forth in SEQ ID NO: 193. In some such methods, the multidomain therapeutic protein consists of the sequence set forth in SEQ ID NO: 193. In some such methods, the coding sequence for the multidomain therapeutic protein is at least 90%, at least 91%, at least 92%, at least 93%, at least 94%, at least 95%, at least 96%, at least 97%, at least 98%, or at least 99% identical to any one of SEQ ID NOS: 194-202, optionally wherein the coding sequence for the multidomain therapeutic protein is at least 90%, at least 91%, at least 92%, at least 93%, at least 94%, at least 95%, at least 96%, at least 97%, at least 98%, or at least 99% identical to SEQ ID NO: 196, optionally wherein the nucleic acid construct comprises a sequence at least 90%, at least 91%, at least 92%, at least 93%, at least 94%, at least 95%, at least 96%, at least 97%, at least 98%, or at least 99% identical to SEQ ID NO: 736. In some such methods, the coding sequence for the multidomain therapeutic protein is at least 90%, at least 91%, at least 92%, at least 93%, at least 94%, at least 95%, at least 96%, at least 97%, at least 98%, or at least 99% identical to any one of SEQ ID NOS: 194-202, and the multidomain therapeutic protein comprises the sequence set forth in SEQ ID NO: 193, optionally wherein the coding sequence for the multidomain therapeutic protein is at least 90%, at least 91%, at least 92%, at least 93%, at least 94%, at least 95%, at least 96%, at least 97%, at least 98%, or at least 99% identical to SEQ ID NO: 196, and the multidomain therapeutic protein comprises the sequence set forth in SEQ ID NO: 193, optionally wherein the nucleic acid construct comprises a sequence at least 90%, at least 91%, at least 92%, at least 93%, at least 94%, at least 95%, at least 96%, at least 97%, at least 98%, or at least 99% identical to SEQ ID NO: 736, and the multidomain therapeutic protein comprises the sequence set forth in SEQ ID NO: 193. In some such methods, the coding sequence for the multidomain therapeutic protein is at least 90%, at least 91%, at least 92%, at least 93%, at least 94%, at least 95%, at least 96%, at least 97%, at least 98%, or at least 99% identical to any one of SEQ ID NOS: 194-202 and is codon-optimized and CpG-depleted, and the multidomain therapeutic protein comprises the sequence set forth in SEQ ID NO: 193, optionally wherein the coding sequence for the multidomain therapeutic protein is at least 90%, at least 91%, at least 92%, at least 93%, at least 94%, at least 95%, at least 96%, at least 97%, at least 98%, or at least 99% identical to SEQ ID NO: 196 and is codon-optimized and CpG-depleted, and the multidomain therapeutic protein comprises the sequence set forth in SEQ ID NO: 193, optionally wherein the nucleic acid construct comprises a sequence at least 90%, at least 91%, at least 92%, at least 93%, at least 94%, at least 95%, at least 96%, at least 97%, at least 98%, or at least 99% identical to SEQ ID NO: 736, the coding sequence for the multidomain therapeutic protein is codon-optimized and CpG-depleted, and the multidomain therapeutic protein comprises the sequence set forth in SEQ ID NO: 193. In some such methods, the coding sequence for the multidomain therapeutic protein comprises the sequence set forth in any one of SEQ ID NOS: 194-202, optionally wherein the coding sequence for the multidomain therapeutic protein comprises the sequence set forth in SEQ ID NO: 196, optionally wherein the nucleic acid construct comprises the sequence set forth in SEQ ID NO: 736. In some such methods, the coding sequence for the multidomain therapeutic protein consists of the sequence set forth in any one of SEQ ID NOS: 194-202, optionally wherein the coding sequence for the multidomain therapeutic protein consists of the sequence set forth in SEQ ID NOS: 196, optionally wherein the nucleic acid construct comprises the sequence set forth in SEQ ID NO: 736.

[0020] In some such methods, the nucleic acid construct comprises a splice acceptor upstream of the coding sequence for the multidomain therapeutic protein. In some such methods, the nucleic acid construct comprises a polyadenylation signal or sequence downstream of the coding sequence for the multidomain therapeutic protein. In some such methods, the nucleic acid construct comprises a splice acceptor upstream of the coding sequence for the multidomain therapeutic protein, and the nucleic acid construct comprises a polyadenylation signal or sequence downstream of the coding sequence for the multidomain therapeutic protein. In some such methods, the nucleic acid construct does not comprise a homology arm. In some such methods, the nucleic acid construct is inserted into the target genomic locus via non-homologous end joining. In some such methods, the nucleic acid construct comprises homology arms. In some such methods, the nucleic acid construct is inserted into the target genomic locus via homology-directed repair. In some such methods, the nucleic acid construct does not comprise a promoter that drives the expression of the multidomain therapeutic protein. In some such methods, the coding sequence for the multidomain therapeutic protein is operably linked to a promoter, optionally wherein the promoter is a liver-specific promoter. In some such methods, the nucleic acid construct is single-stranded DNA or double-stranded DNA. In some such methods, the nucleic acid construct is single-stranded DNA. In some such methods, the nucleic acid construct comprises from 5′ to 3′: a splice acceptor, the coding sequence for the multidomain therapeutic protein, and a polyadenylation signal or sequence, wherein the coding sequence for the multidomain therapeutic protein comprises any one of SEQ ID NOS: 194-202, optionally wherein the coding sequence for the multidomain therapeutic protein comprises the sequence set forth in SEQ ID NO: 196, optionally wherein the nucleic acid construct comprises the sequence set forth in SEQ ID NO: 736, wherein the nucleic acid construct does not comprise a promoter that drives the expression of the multidomain therapeutic protein, and wherein the nucleic acid construct does not comprise a homology arm.

[0021] In some such methods, the nucleic acid construct is in a nucleic acid vector or a lipid nanoparticle. In some such methods, the nucleic acid construct is in the nucleic acid vector. In some such methods, the nucleic acid vector is a viral vector. In some such methods, the nucleic acid vector is an adeno-associated viral (AAV) vector, optionally wherein the nucleic acid construct is flanked by inverted terminal repeats (ITRs) on each end, optionally wherein the ITR on at least one end comprises, consists essentially of, or consists of SEQ ID NO: 160, and optionally wherein the ITR on each end comprises, consists essentially of, or consists of SEQ ID NO: 160. In some such methods, the AAV vector is a single-stranded AAV (ssAAV) vector. In some such methods, the AAV vector is derived from an AAV8 vector, an AAV3B vector, an AAV5 vector, an AAV6 vector, an AAV7 vector, an AAV9 vector, an AAVrh.74 vector, or an AAVhu.37 vector. In some such methods, the AAV vector is a recombinant AAV8 (rAAV8) vector. In some such methods, the AAV vector is a single-stranded rAAV8 vector. In some such methods, the nucleic acid construct comprises from 5′ to 3′: a splice acceptor, the coding sequence for the multidomain therapeutic protein, and a polyadenylation signal or sequence, wherein the coding sequence for the multidomain therapeutic protein comprises any one of SEQ ID NOS: 194-202, optionally wherein the coding sequence for the multidomain therapeutic protein comprises the sequence set forth in SEQ ID NO: 196, optionally wherein the nucleic acid construct comprises the sequence set forth in SEQ ID NO: 736, wherein the nucleic acid construct does not comprise a promoter that drives the expression of the multidomain therapeutic protein, wherein the nucleic acid construct does not comprise a homology arm, and wherein the nucleic acid construct is in a single-stranded rAAV8 vector, optionally wherein the nucleic acid construct is flanked by inverted terminal repeats (ITRs) on each end, optionally wherein the ITR on at least one end comprises, consists essentially of, or consists of SEQ ID NO: 160, and optionally wherein the ITR on each end comprises, consists essentially of, or consists of SEQ ID NO: 160. In some such methods, the nucleic acid construct is CpG-depleted.

[0022] In some such methods, the target genomic locus is an albumin gene, optionally wherein the albumin gene is a human albumin gene. In some such methods, the nuclease target site is in intron 1 of the albumin gene. In some such methods, the nuclease agent comprises: (a) a zinc finger nuclease (ZFN); (b) a transcription activator-like effector nuclease (TALEN); or (c) (i) a Cas protein or a nucleic acid encoding the Cas protein; and (ii) a guide RNA or one or more DNAs encoding the guide RNA, wherein the guide RNA comprises a DNA-targeting segment that targets a guide RNA target sequence, and wherein the guide RNA binds to the Cas protein and targets the Cas protein to the guide RNA target sequence.

[0023] In some such methods, the nuclease agent comprises: (a) a Cas protein or a nucleic acid encoding the Cas protein; and (b) a guide RNA or one or more DNAs encoding the guide RNA, wherein the guide RNA comprises a DNA-targeting segment that targets a guide RNA target sequence, and wherein the guide RNA binds to the Cas protein and targets the Cas protein to the guide RNA target sequence. In some such methods, the guide RNA target sequence is in intron 1 of an albumin gene. In some such methods, the albumin gene is a human albumin gene. In some such methods, the DNA-targeting segment comprises at least 17, at least 18, at least 19, or at least 20 contiguous nucleotides of the sequence set forth in any one of SEQ ID NOS: 30-61, optionally wherein the DNA-targeting segment comprises at least 17, at least 18, at least 19, or at least 20 contiguous nucleotides of the sequence set forth in any one of SEQ ID NOS: 36, 30, 33, and 41. In some such methods, the DNA-targeting segment is at least 90% or at least 95% identical to the sequence set forth in any one of SEQ ID NOS: 30-61, optionally wherein the DNA-targeting segment is at least 90% or at least 95% identical to the sequence set forth in any one of SEQ ID NOS: 36, 30, 33, and 41. In some such methods, the DNA-targeting segment comprises any one of SEQ ID NOS: 30-61, optionally wherein the DNA-targeting segment comprises any one of SEQ ID NOS: 36, 30, 33, and 41. In some such methods, the DNA-targeting segment consists of any one of SEQ ID NOS: 30-61, optionally wherein the DNA-targeting segment consists of any one of SEQ ID NOS: 36, 30, 33, and 41. In some such methods, the guide RNA comprises any one of SEQ ID NOS: 62-125, optionally wherein the guide RNA comprises any one of SEQ ID NOS: 68, 100, 62, 94, 65, 97, 73, and 105. In some such methods, the DNA-targeting segment comprises at least 17, at least 18, at least 19, or at least 20 contiguous nucleotides of SEQ ID NO: 36. In some such methods, the DNA-targeting segment is at least 90% or at least 95% identical to SEQ ID NO: 36. In some such methods, the DNA-targeting segment comprises SEQ ID NO: 36. In some such methods, the DNA-targeting segment consists of SEQ ID NO: 36. In some such methods, the guide RNA comprises SEQ ID NO: 68 or 100.

[0024] In some such methods, the method comprises administering the guide RNA in the form of RNA. In some such methods, the guide RNA comprises at least one modification. In some such methods, the at least one modification comprises a 2′-O-methyl-modified nucleotide. In some such methods, the at least one modification comprises a phosphorothioate bond between nucleotides. In some such methods, the at least one modification comprises a modification at one or more of the first five nucleotides at the 5′ end of the guide RNA. In some such methods, the at least one modification comprises a modification at one or more of the last five nucleotides at the 3′ end of the guide RNA. In some such methods, the at least one modification comprises phosphorothioate bonds between the first four nucleotides at the 5′ end of the guide RNA. In some such methods, the at least one modification comprises phosphorothioate bonds between the last four nucleotides at the 3′ end of the guide RNA. In some such methods, the at least one modification comprises 2′-O-methyl-modified nucleotides at the first three nucleotides at the 5′ end of the guide RNA. In some such methods, the at least one modification comprises 2′-O-methyl-modified nucleotides at the last three nucleotides at the 3′ end of the guide RNA. In some such methods, the at least one modification comprises: (i) phosphorothioate bonds between the first four nucleotides at the 5′ end of the guide RNA; (ii) phosphorothioate bonds between the last four nucleotides at the 3′ end of the guide RNA; (iii) 2′-O-methyl-modified nucleotides at the first three nucleotides at the 5′ end of the guide RNA; and (iv) 2′-O-methyl-modified nucleotides at the last three nucleotides at the 3′ end of the guide RNA. In some such methods, the guide RNA is a single guide RNA (sgRNA). In some such methods, the method comprises administering the guide RNA in the form of RNA, the guide RNA comprises SEQ ID NO: 100, and the guide RNA comprises: (i) phosphorothioate bonds between the first four nucleotides at the 5′ end of the guide RNA; (ii) phosphorothioate bonds between the last four nucleotides at the 3′ end of the guide RNA; (iii) 2′-O-methyl-modified nucleotides at the first three nucleotides at the 5′ end of the guide RNA; and (iv) 2′-O-methyl-modified nucleotides at the last three nucleotides at the 3′ end of the guide RNA.

[0025] In some such methods, the Cas protein is a Cas9 protein. In some such methods, the Cas9 protein is derived from a Streptococcus pyogenes Cas9 protein, a Staphylococcus aureus Cas9 protein, a Campylobacter jejuni Cas9 protein, a Streptococcus thermophilus Cas9 protein, or a Neisseria meningitidis Cas9 protein. In some such methods, the Cas protein is derived from a Streptococcus pyogenes Cas9 protein. In some such methods, the Cas protein comprises the sequence set forth in SEQ ID NO: 11. In some such methods, the nucleic acid encoding the Cas protein is codon-optimized for expression in a mammalian cell or a human cell. In some such methods, the method comprises administering the nucleic acid encoding the Cas protein, wherein the nucleic acid comprises an mRNA encoding the Cas protein. In some such methods, the mRNA encoding the Cas protein comprises at least one modification. In some such methods, the mRNA encoding the Cas protein is modified to comprise a modified uridine at one or more or all uridine positions. In some such methods, the modified uridine is pseudouridine or N1-methyl-pseudouridine, optionally N1-methyl-pseudouridine. In some such methods, the mRNA encoding the Cas protein is fully substituted with pseudouridine or N1-methyl-pseudouridine, optionally N1-methyl-pseudouridine. In some such methods, the modified uridine is pseudouridine. In some such methods, the mRNA encoding the Cas protein is fully substituted with pseudouridine. In some such methods, the mRNA encoding the Cas protein comprises a 5′ cap. In some such methods, the mRNA encoding the Cas protein comprises a polyadenylation sequence. In some such methods, the mRNA encoding the Cas protein comprises the sequence set forth in SEQ ID NO: 226, 225, or 12. In some such methods, the method comprises administering the nucleic acid encoding the Cas protein, wherein the nucleic acid comprises an mRNA encoding the Cas protein, the mRNA encoding the Cas protein comprises the sequence set forth in SEQ ID NO: 226, 225, or 12, and the mRNA encoding the Cas protein is fully substituted with pseudouridine or N1-methyl-pseudouridine, optionally N1-methyl-pseudouridine, comprises a 5′ cap, and comprises a polyadenylation sequence. In some such methods, the method comprises administering the nucleic acid encoding the Cas protein, wherein the nucleic acid comprises an mRNA encoding the Cas protein, the mRNA encoding the Cas protein comprises the sequence set forth in SEQ ID NO: 226, 225, or 12, and the mRNA encoding the Cas protein is fully substituted with pseudouridine, comprises a 5′ cap, and comprises a polyadenylation sequence.

[0026] In some such methods, the method comprises administering the guide RNA in the form of RNA, and the guide RNA comprises SEQ ID NO: 68 or 100, and wherein the method comprises administering the nucleic acid encoding the Cas protein, wherein the nucleic acid comprises an mRNA encoding the Cas protein, and the mRNA encoding the Cas protein comprises the sequence set forth in SEQ ID NO: 226, 225, or 12. In some such methods, the nucleic acid construct comprises from 5′ to 3′: a splice acceptor, the coding sequence for the multidomain therapeutic protein, and a polyadenylation signal or sequence, wherein the coding sequence for the multidomain therapeutic protein comprises any one of SEQ ID NOS: 194-202, optionally wherein the coding sequence for the multidomain therapeutic protein comprises the sequence set forth in SEQ ID NO: 196, optionally wherein the nucleic acid construct comprises the sequence set forth in SEQ ID NO: 736, wherein the nucleic acid construct does not comprise a promoter that drives the expression of the multidomain therapeutic protein, wherein the nucleic acid construct does not comprise a homology arm, and wherein the nucleic acid construct is in a single-stranded rAAV8 vector, optionally wherein the nucleic acid construct is flanked by inverted terminal repeats (ITRs) on each end, optionally wherein the ITR on at least one end comprises, consists essentially of, or consists of SEQ ID NO: 160, and optionally wherein the ITR on each end comprises, consists essentially of, or consists of SEQ ID NO: 160. In some such methods, the method comprises administering the guide RNA in the form of RNA, the guide RNA comprises SEQ ID NO: 100, and the guide RNA comprises: (i) phosphorothioate bonds between the first four nucleotides at the 5′ end of the guide RNA; (ii) phosphorothioate bonds between the last four nucleotides at the 3′ end of the guide RNA; (iii) 2′-O-methyl-modified nucleotides at the first three nucleotides at the 5′ end of the guide RNA; and (iv) 2′-O-methyl-modified nucleotides at the last three nucleotides at the 3′ end of the guide RNA, and wherein the method comprises administering the nucleic acid encoding the Cas protein, wherein the nucleic acid comprises an mRNA encoding the Cas protein, the mRNA encoding the Cas protein comprises the sequence set forth in SEQ ID NO: 226, 225, or 12, and the mRNA encoding the Cas protein is fully substituted with pseudouridine or N1-methyl-pseudouridine, optionally N1-methyl-pseudouridine, comprises a 5′ cap, and comprises a polyadenylation sequence. In some such methods, the nucleic acid construct comprises from 5′ to 3′: a splice acceptor, the coding sequence for the multidomain therapeutic protein, and a polyadenylation signal or sequence, wherein the coding sequence for the multidomain therapeutic protein comprises any one of SEQ ID NOS: 194-202, optionally wherein the coding sequence for the multidomain therapeutic protein comprises the sequence set forth in SEQ ID NO: 196, optionally wherein the nucleic acid construct comprises the sequence set forth in SEQ ID NO: 736, wherein the nucleic acid construct does not comprise a promoter that drives the expression of the multidomain therapeutic protein, wherein the nucleic acid construct does not comprise a homology arm, and wherein the nucleic acid construct is in a single-stranded rAAV8 vector, optionally wherein the nucleic acid construct is flanked by inverted terminal repeats (ITRs) on each end, optionally wherein the ITR on at least one end comprises, consists essentially of, or consists of SEQ ID NO: 160, and optionally wherein the ITR on each end comprises, consists essentially of, or consists of SEQ ID NO: 160. In some such methods, the method comprises administering the guide RNA in the form of RNA, the guide RNA comprises SEQ ID NO: 100, and the guide RNA comprises: (i) phosphorothioate bonds between the first four nucleotides at the 5′ end of the guide RNA; (ii) phosphorothioate bonds between the last four nucleotides at the 3′ end of the guide RNA; (iii) 2′-O-methyl-modified nucleotides at the first three nucleotides at the 5′ end of the guide RNA; and (iv) 2′-O-methyl-modified nucleotides at the last three nucleotides at the 3′ end of the guide RNA, and wherein the method comprises administering the nucleic acid encoding the Cas protein, wherein the nucleic acid comprises an mRNA encoding the Cas protein, the mRNA encoding the Cas protein comprises the sequence set forth in SEQ ID NO: 226, 225, or 12, and the mRNA encoding the Cas protein is fully substituted with pseudouridine, comprises a 5′ cap, and comprises a polyadenylation sequence. In some such methods, the nucleic acid construct comprises from 5′ to 3′: a splice acceptor, the coding sequence for the multidomain therapeutic protein, and a polyadenylation signal or sequence, wherein the coding sequence for the multidomain therapeutic protein comprises any one of SEQ ID NOS: 194-202, optionally wherein the coding sequence for the multidomain therapeutic protein comprises the sequence set forth in SEQ ID NO: 196, optionally wherein the nucleic acid construct comprises the sequence set forth in SEQ ID NO: 736, wherein the nucleic acid construct does not comprise a promoter that drives the expression of the multidomain therapeutic protein, wherein the nucleic acid construct does not comprise a homology arm, and wherein the nucleic acid construct is in a single-stranded rAAV8 vector, optionally wherein the nucleic acid construct is flanked by inverted terminal repeats (ITRs) on each end, optionally wherein the ITR on at least one end comprises, consists essentially of, or consists of SEQ ID NO: 160, and optionally wherein the ITR on each end comprises, consists essentially of, or consists of SEQ ID NO: 160.

[0027] In some such methods, the Cas protein or the nucleic acid encoding the Cas protein and the guide RNA or the one or more DNAs encoding the guide RNA are associated with a lipid nanoparticle. In some such methods, the lipid nanoparticle comprises a cationic lipid, a neutral lipid, a helper lipid, and a stealth lipid. In some such methods, the cationic lipid is Lipid A ((9Z,12Z)-3-((4,4-bis(octyloxy)butanoyl)oxy)-2-((((3-(diethylamino)propoxy)carbonyl)oxy)methyl)propyl octadeca-9,12-dienoate). In some such methods, the neutral lipid is distearoylphosphatidylcholine or 1,2-distearoyl-sn-glycero-3-phosphocholine (DSPC). In some such methods, the helper lipid is cholesterol. In some such methods, the stealth lipid is PEG2k-DMG. In some such methods, the cationic lipid is Lipid A, the neutral lipid is DSPC, the helper lipid is cholesterol, and the stealth lipid is PEG2k-DMG. In some such methods, the lipid nanoparticle comprises four lipids at the following molar ratios: about 50 mol% Lipid A, about 9 mol% DSPC, about 38 mol% cholesterol, and about 3 mol% PEG2k-DMG.

[0028] In some such methods, the albumin gene is a human albumin gene, wherein the method comprises administering the guide RNA in the form of RNA, and the guide RNA comprises SEQ ID NO: 68 or 100, wherein the method comprises administering the nucleic acid encoding the Cas protein, wherein the nucleic acid comprises an mRNA encoding the Cas protein, and the mRNA encoding the Cas protein comprises the sequence set forth in SEQ ID NO: 226, 225, or 12, and wherein the guide RNA and the mRNA encoding the Cas protein are associated with a lipid nanoparticle comprising Lipid A, DSPC, cholesterol, and PEG2k-DMG, optionally at the following molar ratios: about 50 mol% Lipid A, about 9 mol% DSPC, about 38 mol% cholesterol, and about 3 mol% PEG2k-DMG. In some such methods, the nucleic acid construct comprises from 5′ to 3′: a splice acceptor, the coding sequence for the multidomain therapeutic protein, and a polyadenylation signal or sequence, wherein the coding sequence for the multidomain therapeutic protein comprises any one of SEQ ID NOS: 194-202, optionally wherein the coding sequence for the multidomain therapeutic protein comprises the sequence set forth in SEQ ID NO: 196, optionally wherein the nucleic acid construct comprises the sequence set forth in SEQ ID NO: 736, wherein the nucleic acid construct does not comprise a promoter that drives the expression of the multidomain therapeutic protein, wherein the nucleic acid construct does not comprise a homology arm, and wherein the nucleic acid construct is in a single-stranded rAAV8 vector, optionally wherein the nucleic acid construct is flanked by inverted terminal repeats (ITRs) on each end, optionally wherein the ITR on at least one end comprises, consists essentially of, or consists of SEQ ID NO: 160, and optionally wherein the ITR on each end comprises, consists essentially of, or consists of SEQ ID NO: 160.

[0029] In some such methods, the albumin gene is a human albumin gene, wherein the method comprises administering the guide RNA in the form of RNA, the guide RNA comprises SEQ ID NO: 100, and the guide RNA comprises: (i) phosphorothioate bonds between the first four nucleotides at the 5′ end of the guide RNA; (ii) phosphorothioate bonds between the last four nucleotides at the 3′ end of the guide RNA; (iii) 2′-O-methyl-modified nucleotides at the first three nucleotides at the 5′ end of the guide RNA; and (iv) 2′-O-methyl-modified nucleotides at the last three nucleotides at the 3′ end of the guide RNA, wherein the method comprises administering the nucleic acid encoding the Cas protein, wherein the nucleic acid comprises an mRNA encoding the Cas protein, the mRNA encoding the Cas protein comprises the sequence set forth in SEQ ID NO: 226, 225, or 12, and the mRNA encoding the Cas protein is fully substituted with pseudouridine or N1-methyl-pseudouridine, optionally N1-methyl-pseudouridine, comprises a 5′ cap, and comprises a polyadenylation sequence, and wherein the guide RNA and the mRNA encoding the Cas protein are associated with a lipid nanoparticle comprising Lipid A, DSPC, cholesterol, and PEG2k-DMG, optionally at the following molar ratios: about 50 mol% Lipid A, about 9 mol% DSPC, about 38 mol% cholesterol, and about 3 mol% PEG2k-DMG. In some such methods, the albumin gene is a human albumin gene, wherein the method comprises administering the guide RNA in the form of RNA, the guide RNA comprises SEQ ID NO: 100, and the guide RNA comprises: (i) phosphorothioate bonds between the first four nucleotides at the 5′ end of the guide RNA; (ii) phosphorothioate bonds between the last four nucleotides at the 3′ end of the guide RNA; (iii) 2′-O-methyl-modified nucleotides at the first three nucleotides at the 5′ end of the guide RNA; and (iv) 2′-O-methyl-modified nucleotides at the last three nucleotides at the 3′ end of the guide RNA, wherein the method comprises administering the nucleic acid encoding the Cas protein, wherein the nucleic acid comprises an mRNA encoding the Cas protein, the mRNA encoding the Cas protein comprises the sequence set forth in SEQ ID NO: 226, 225, or 12, and the mRNA encoding the Cas protein is fully substituted with pseudouridine, comprises a 5′ cap, and comprises a polyadenylation sequence, and wherein the guide RNA and the mRNA encoding the Cas protein are associated with a lipid nanoparticle comprising Lipid A, DSPC, cholesterol, and PEG2k-DMG, optionally at the following molar ratios: about 50 mol% Lipid A, about 9 mol% DSPC, about 38 mol% cholesterol, and about 3 mol% PEG2k-DMG. In some such methods, the nucleic acid construct comprises from 5′ to 3′: a splice acceptor, the coding sequence for the multidomain therapeutic protein, and a polyadenylation signal or sequence, wherein the coding sequence for the multidomain therapeutic protein comprises any one of SEQ ID NOS: 194-202, optionally wherein the coding sequence for the multidomain therapeutic protein comprises the sequence set forth in SEQ ID NO: 196, optionally wherein the nucleic acid construct comprises the sequence set forth in SEQ ID NO: 736, wherein the nucleic acid construct does not comprise a promoter that drives the expression of the multidomain therapeutic protein, wherein the nucleic acid construct does not comprise a homology arm, and wherein the nucleic acid construct is in a single-stranded rAAV8 vector, optionally wherein the nucleic acid construct is flanked by inverted terminal repeats (ITRs) on each end, optionally wherein the ITR on at least one end comprises, consists essentially of, or consists of SEQ ID NO: 160, and optionally wherein the ITR on each end comprises, consists essentially of, or consists of SEQ ID NO: 160.

[0030] In another aspect, provided are a neonatal cell or a population of neonatal cells made by any of the above methods. In another aspect, provided are a cell or a population of cells made by any of the above methods. In another aspect, provided are a neonatal cell or a population of neonatal cells comprising a nucleic acid construct inserted into a target genomic locus, wherein the nucleic acid construct comprises a coding sequence for a multidomain therapeutic protein comprising a delivery domain fused to a lysosomal alpha-glucosidase inserted into a target genomic locus, optionally wherein the delivery domain is a CD63-binding delivery domain or a TfR-binding delivery domain. In another aspect, provided are a neonatal cell or a population of neonatal cells comprising a nucleic acid construct inserted into a target genomic locus, wherein the nucleic acid construct comprises a coding sequence for a multidomain therapeutic protein comprising a CD63-binding delivery domain fused to a lysosomal alpha-glucosidase inserted into a target genomic locus. In some such neonatal cells or populations of neonatal cells, the neonatal cell is a liver cell or the population of neonatal cells is a population of liver cells. In some such neonatal cells or populations of neonatal cells, the neonatal cell is a hepatocyte or the population of neonatal cells is a population of hepatocytes. In some such neonatal cells or populations of neonatal cells, the neonatal cell is a human cell or the population of neonatal cells is a population of human cells. In some such neonatal cells or populations of neonatal cells, the neonatal cell or the population of neonatal cells is from a human neonatal subject within 24 weeks after birth. In some such neonatal cells or populations of neonatal cells, the neonatal cell or the population of neonatal cells is from a human neonatal subject within 12 weeks after birth. In some such neonatal cells or populations of neonatal cells, the neonatal cell or the population of neonatal cells is from a human neonatal subject within 8 weeks after birth. In some such neonatal cells or populations of neonatal cells, the neonatal cell or the population of neonatal cells is from a human neonatal subject within 4 weeks after birth. In some such neonatal cells or populations of neonatal cells, the neonatal cell is in vitro or ex vivo or the population of neonatal cells is in vitro or ex vivo. In some such neonatal cells or populations of neonatal cells, the neonatal cell is in vivo in a subject or the population of neonatal cells is in vivo. In some such neonatal cells or populations of neonatal cells, the multidomain therapeutic protein is expressed.

[0031] In some such neonatal cells or populations of neonatal cells, the CD63-binding delivery domain is fused to the lysosomal alpha-glucosidase protein via a peptide linker. In some such neonatal cells or populations of neonatal cells, the coding sequence for the CD63-binding delivery domain is codon-optimized or CpG-depleted. In some such neonatal cells or populations of neonatal cells, the coding sequence for the CD63-binding delivery domain is codon-optimized and CpG-depleted. In some such neonatal cells or populations of neonatal cells, the CD63-binding delivery domain comprises an anti-CD63 antigen-binding protein. In some such neonatal cells or populations of neonatal cells, the CD63-binding delivery domain comprises an anti-CD63 antibody, antibody fragment, or single-chain variable fragment (scFv). In some such neonatal cells or populations of neonatal cells, the CD63-binding delivery domain is the single-chain variable fragment (scFv). In some such neonatal cells or populations of neonatal cells, the scFv comprises the sequence set forth in SEQ ID NO: 183. In some such neonatal cells or populations of neonatal cells, the scFv consists of the sequence set forth in SEQ ID NO: 183. In some such neonatal cells or populations of neonatal cells, the scFv coding sequence is at least 90%, at least 91%, at least 92%, at least 93%, at least 94%, at least 95%, at least 96%, at least 97%, at least 98%, or at least 99% identical to any one of SEQ ID NOS: 184-192, optionally wherein the scFv coding sequence is at least 90%, at least 91%, at least 92%, at least 93%, at least 94%, at least 95%, at least 96%, at least 97%, at least 98%, or at least 99% identical to SEQ ID NO: 186. In some such neonatal cells or populations of neonatal cells, the scFv coding sequence is at least 90%, at least 91%, at least 92%, at least 93%, at least 94%, at least 95%, at least 96%, at least 97%, at least 98%, or at least 99% identical to any one of SEQ ID NOS: 184-192 and encodes an scFv comprising SEQ ID NO: 183, optionally wherein the scFv coding sequence is at least 90%, at least 91%, at least 92%, at least 93%, at least 94%, at least 95%, at least 96%, at least 97%, at least 98%, or at least 99% identical to SEQ ID NO: 186 and encodes an scFv comprising SEQ ID NO: 183. In some such neonatal cells or populations of neonatal cells, the scFv coding sequence is at least 90%, at least 91%, at least 92%, at least 93%, at least 94%, at least 95%, at least 96%, at least 97%, at least 98%, or at least 99% identical to any one of SEQ ID NOS: 184-192, is codon-optimized and CpG-depleted, and encodes an scFv comprising SEQ ID NO: 183, optionally wherein the scFv coding sequence is at least 90%, at least 91%, at least 92%, at least 93%, at least 94%, at least 95%, at least 96%, at least 97%, at least 98%, or at least 99% identical to SEQ ID NO: 186, is codon-optimized and CpG-depleted, and encodes an scFv comprising SEQ ID NO: 183. In some such neonatal cells or populations of neonatal cells, the scFv coding sequence comprises the sequence set forth in any one of SEQ ID NOS: 184-192, optionally wherein the scFv coding sequence comprises the sequence set forth in SEQ ID NO: 186. In some such neonatal cells or populations of neonatal cells, the scFv coding sequence consists of the sequence set forth in any one of SEQ ID NOS: 184-192, optionally wherein the scFv coding sequence consists of the sequence set forth in SEQ ID NO: 186.

[0032] In some such neonatal cells or populations of neonatal cells, the lysosomal alpha-glucosidase lacks the lysosomal alpha-glucosidase signal peptide and propeptide. In some such neonatal cells or populations of neonatal cells, the lysosomal alpha-glucosidase comprises the sequence set forth in SEQ ID NO: 173. In some such neonatal cells or populations of neonatal cells, the lysosomal alpha-glucosidase consists of the sequence set forth in SEQ ID NO: 173. In some such neonatal cells or populations of neonatal cells, the lysosomal alpha-glucosidase coding sequence is codon-optimized or CpG-depleted. In some such neonatal cells or populations of neonatal cells, the lysosomal alpha-glucosidase coding sequence is codon-optimized and CpG-depleted. In some such neonatal cells or populations of neonatal cells, the lysosomal alpha-glucosidase coding sequence is at least 90%, at least 91%, at least 92%, at least 93%, at least 94%, at least 95%, at least 96%, at least 97%, at least 98%, or at least 99% identical to any one of SEQ ID NOS: 174-182 and 205-212, optionally wherein the lysosomal alpha-glucosidase coding sequence is at least 90%, at least 91%, at least 92%, at least 93%, at least 94%, at least 95%, at least 96%, at least 97%, at least 98%, or at least 99% identical to SEQ ID NO: 176. In some such neonatal cells or populations of neonatal cells, the lysosomal alpha-glucosidase coding sequence is at least 90%, at least 91%, at least 92%, at least 93%, at least 94%, at least 95%, at least 96%, at least 97%, at least 98%, or at least 99% identical to any one of SEQ ID NOS: 174-182 and 205-212 and encodes a lysosomal alpha-glucosidase protein comprising SEQ ID NO: 173, optionally wherein the lysosomal alpha-glucosidase coding sequence is at least 90%, at least 91%, at least 92%, at least 93%, at least 94%, at least 95%, at least 96%, at least 97%, at least 98%, or at least 99% identical to SEQ ID NO: 176 and encodes a lysosomal alpha-glucosidase protein comprising SEQ ID NO: 173. In some such neonatal cells or populations of neonatal cells, the lysosomal alpha-glucosidase coding sequence is at least 90%, at least 91%, at least 92%, at least 93%, at least 94%, at least 95%, at least 96%, at least 97%, at least 98%, or at least 99% identical to any one of SEQ ID NOS: 174-182 and 205-212, is codon-optimized and CpG-depleted, and encodes a lysosomal alpha-glucosidase protein comprising SEQ ID NO: 173, optionally wherein the lysosomal alpha-glucosidase coding sequence is at least 90%, at least 91%, at least 92%, at least 93%, at least 94%, at least 95%, at least 96%, at least 97%, at least 98%, or at least 99% identical to SEQ ID NO: 176, is codon-optimized and CpG-depleted, and encodes a lysosomal alpha-glucosidase protein comprising SEQ ID NO: 173. In some such neonatal cells or populations of neonatal cells, the lysosomal alpha-glucosidase coding sequence comprises the sequence set forth in any one of SEQ ID NOS: 174-182 and 205-212, optionally wherein the lysosomal alpha-glucosidase coding sequence comprises the sequence set forth in SEQ ID NO: 176. In some such neonatal cells or populations of neonatal cells, the lysosomal alpha-glucosidase coding sequence consists of the sequence set forth in any one of SEQ ID NOS: 174-182 and 205-212, optionally wherein the lysosomal alpha-glucosidase coding sequence consists of the sequence set forth in SEQ ID NO: 176.

[0033] In some such neonatal cells or populations of neonatal cells, the lysosomal alpha-glucosidase lacks the lysosomal alpha-glucosidase signal peptide and propeptide. In some such neonatal cells or populations of neonatal cells, the lysosomal alpha-glucosidase comprises the sequence set forth in SEQ ID NO: 173. In some such neonatal cells or populations of neonatal cells, the lysosomal alpha-glucosidase consists of the sequence set forth in SEQ ID NO: 173. In some such neonatal cells or populations of neonatal cells, the lysosomal alpha-glucosidase coding sequence is codon-optimized or CpG-depleted. In some such neonatal cells or populations of neonatal cells, the lysosomal alpha-glucosidase coding sequence is codon-optimized and CpG-depleted. In some such neonatal cells or populations of neonatal cells, the lysosomal alpha-glucosidase coding sequence is at least 90%, at least 91%, at least 92%, at least 93%, at least 94%, at least 95%, at least 96%, at least 97%, at least 98%, or at least 99% identical to any one of SEQ ID NOS: 174-182, optionally wherein the lysosomal alpha-glucosidase coding sequence is at least 90%, at least 91%, at least 92%, at least 93%, at least 94%, at least 95%, at least 96%, at least 97%, at least 98%, or at least 99% identical to SEQ ID NO: 176. In some such neonatal cells or populations of neonatal cells, the lysosomal alpha-glucosidase coding sequence is at least 90%, at least 91%, at least 92%, at least 93%, at least 94%, at least 95%, at least 96%, at least 97%, at least 98%, or at least 99% identical to any one of SEQ ID NOS: 174-182 and encodes a lysosomal alpha-glucosidase protein comprising SEQ ID NO: 173, optionally wherein the lysosomal alpha-glucosidase coding sequence is at least 90%, at least 91%, at least 92%, at least 93%, at least 94%, at least 95%, at least 96%, at least 97%, at least 98%, or at least 99% identical to SEQ ID NO: 176 and encodes a lysosomal alpha-glucosidase protein comprising SEQ ID NO: 173. In some such neonatal cells or populations of neonatal cells, the lysosomal alpha-glucosidase coding sequence is at least 90%, at least 91%, at least 92%, at least 93%, at least 94%, at least 95%, at least 96%, at least 97%, at least 98%, or at least 99% identical to any one of SEQ ID NOS: 174-182, is codon-optimized and CpG-depleted, and encodes a lysosomal alpha-glucosidase protein comprising SEQ ID NO: 173, optionally wherein the lysosomal alpha-glucosidase coding sequence is at least 90%, at least 91%, at least 92%, at least 93%, at least 94%, at least 95%, at least 96%, at least 97%, at least 98%, or at least 99% identical to SEQ ID NO: 176, is codon-optimized and CpG-depleted, and encodes a lysosomal alpha-glucosidase protein comprising SEQ ID NO: 173. In some such neonatal cells or populations of neonatal cells, the lysosomal alpha-glucosidase coding sequence comprises the sequence set forth in any one of SEQ ID NOS: 174-182, optionally wherein the lysosomal alpha-glucosidase coding sequence comprises the sequence set forth in SEQ ID NO: 176. In some such neonatal cells or populations of neonatal cells, the lysosomal alpha-glucosidase coding sequence consists of the sequence set forth in any one of SEQ ID NOS: 174-182, optionally wherein the lysosomal alpha-glucosidase coding sequence consists of the sequence set forth in SEQ ID NO: 176.

[0034] In some such neonatal cells or populations of neonatal cells, the coding sequence for the multidomain therapeutic protein is codon-optimized or CpG-depleted. In some such neonatal cells or populations of neonatal cells, the coding sequence for the multidomain therapeutic protein is codon-optimized and CpG-depleted. In some such neonatal cells or populations of neonatal cells, the multidomain therapeutic protein comprises the sequence set forth in SEQ ID NO: 193. In some such neonatal cells or populations of neonatal cells, the multidomain therapeutic protein consists of the sequence set forth in SEQ ID NO: 193. In some such neonatal cells or populations of neonatal cells, the coding sequence for the multidomain therapeutic protein is at least 90%, at least 91%, at least 92%, at least 93%, at least 94%, at least 95%, at least 96%, at least 97%, at least 98%, or at least 99% identical to any one of SEQ ID NOS: 194-202, optionally wherein the coding sequence for the multidomain therapeutic protein is at least 90%, at least 91%, at least 92%, at least 93%, at least 94%, at least 95%, at least 96%, at least 97%, at least 98%, or at least 99% identical to SEQ ID NO: 196, optionally wherein the nucleic acid construct comprises a sequence at least 90%, at least 91%, at least 92%, at least 93%, at least 94%, at least 95%, at least 96%, at least 97%, at least 98%, or at least 99% identical to SEQ ID NO: 736. In some such neonatal cells or populations of neonatal cells, the coding sequence for the multidomain therapeutic protein is at least 90%, at least 91%, at least 92%, at least 93%, at least 94%, at least 95%, at least 96%, at least 97%, at least 98%, or at least 99% identical to any one of SEQ ID NOS: 194-202, and the multidomain therapeutic protein comprises the sequence set forth in SEQ ID NO: 193, optionally wherein the coding sequence for the multidomain therapeutic protein is at least 90%, at least 91%, at least 92%, at least 93%, at least 94%, at least 95%, at least 96%, at least 97%, at least 98%, or at least 99% identical to SEQ ID NO: 196, and the multidomain therapeutic protein comprises the sequence set forth in SEQ ID NO: 193, optionally wherein the nucleic acid construct comprises a sequence at least 90%, at least 91%, at least 92%, at least 93%, at least 94%, at least 95%, at least 96%, at least 97%, at least 98%, or at least 99% identical to SEQ ID NO: 736, and the multidomain therapeutic protein comprises the sequence set forth in SEQ ID NO: 193. In some such neonatal cells or populations of neonatal cells, the coding sequence for the multidomain therapeutic protein is at least 90%, at least 91%, at least 92%, at least 93%, at least 94%, at least 95%, at least 96%, at least 97%, at least 98%, or at least 99% identical to any one of SEQ ID NOS: 194-202 and is codon-optimized and CpG-depleted, and the multidomain therapeutic protein comprises the sequence set forth in SEQ ID NO: 193, optionally wherein the coding sequence for the multidomain therapeutic protein is at least 90%, at least 91%, at least 92%, at least 93%, at least 94%, at least 95%, at least 96%, at least 97%, at least 98%, or at least 99% identical to SEQ ID NO: 196 and is codon-optimized and CpG-depleted, and the multidomain therapeutic protein comprises the sequence set forth in SEQ ID NO: 193, optionally wherein the nucleic acid construct comprises a sequence at least 90%, at least 91%, at least 92%, at least 93%, at least 94%, at least 95%, at least 96%, at least 97%, at least 98%, or at least 99% identical to SEQ ID NO: 736, the coding sequence for the multidomain therapeutic protein is codon-optimized and CpG-depleted, and the multidomain therapeutic protein comprises the sequence set forth in SEQ ID NO: 193. In some such neonatal cells or populations of neonatal cells, the coding sequence for the multidomain therapeutic protein comprises the sequence set forth in any one of SEQ ID NOS: 194-202, optionally wherein the coding sequence for the multidomain therapeutic protein comprises the sequence set forth in SEQ ID NO: 196, optionally wherein the nucleic acid construct comprises the sequence set forth in SEQ ID NO: 736. In some such neonatal cells or populations of neonatal cells, the coding sequence for the multidomain therapeutic protein consists of the sequence set forth in any one of SEQ ID NOS: 194-202, optionally wherein the coding sequence for the multidomain therapeutic protein consists of the sequence set forth in SEQ ID NO: 196, optionally wherein the nucleic acid construct comprises the sequence set forth in SEQ ID NO: 736.

[0035] In some such neonatal cells or populations of neonatal cells, the nucleic acid construct comprises a splice acceptor upstream of the coding sequence for the multidomain therapeutic protein. In some such neonatal cells or populations of neonatal cells, the nucleic acid construct comprises a polyadenylation signal or sequence downstream of the coding sequence for the multidomain therapeutic protein. In some such neonatal cells or populations of neonatal cells, the nucleic acid construct comprises a splice acceptor upstream of the coding sequence for the multidomain therapeutic protein, and the nucleic acid construct comprises a polyadenylation signal or sequence downstream of the coding sequence for the multidomain therapeutic protein. In some such neonatal cells or populations of neonatal cells, the nucleic acid construct does not comprise a promoter that drives the expression of the multidomain therapeutic protein, and wherein the coding sequence for the multidomain therapeutic protein is operably linked to an endogenous promoter at the target genomic locus. In some such neonatal cells or populations of neonatal cells, the coding sequence for the multidomain therapeutic protein is operably linked to a promoter, optionally wherein the promoter is a liver-specific promoter. In some such neonatal cells or populations of neonatal cells, the nucleic acid construct comprises from 5′ to 3′: a splice acceptor, the coding sequence for the multidomain therapeutic protein, and a polyadenylation signal or sequence, wherein the coding sequence for the multidomain therapeutic protein comprises any one of SEQ ID NOS: 194-202, optionally wherein the coding sequence for the multidomain therapeutic protein comprises the sequence set forth in SEQ ID NO: 196, optionally wherein the nucleic acid construct comprises the sequence set forth in SEQ ID NO: 736, wherein the nucleic acid construct does not comprise a promoter that drives the expression of the multidomain therapeutic protein, and wherein the coding sequence for the multidomain therapeutic protein is operably linked to an endogenous promoter at the target genomic locus.

[0036] In some such neonatal cells or populations of neonatal cells, the target genomic locus is an albumin gene, optionally wherein the albumin gene is a human albumin gene. In some such neonatal cells or populations of neonatal cells, the nuclease target site is in intron 1 of the albumin gene.

[0037] In another aspect, provided are compositions comprising a nucleic acid construct comprising a coding sequence for a multidomain therapeutic protein comprising a delivery domain fused to a lysosomal alpha-glucosidase, wherein the lysosomal alpha-glucosidase coding sequence is CpG-depleted relative to a wild type lysosomal alpha-glucosidase coding sequence, optionally wherein the delivery domain is a CD63-binding delivery domain or a TfR-binding delivery domain. In another aspect, provided are compositions comprising a nucleic acid construct comprising a coding sequence for a multidomain therapeutic protein comprising a CD63-binding delivery domain fused to a lysosomal alpha-glucosidase, wherein the lysosomal alpha-glucosidase coding sequence is CpG-depleted relative to a wild type lysosomal alpha-glucosidase coding sequence. In some such compositions, the CD63-binding delivery domain is fused to the lysosomal alpha-glucosidase protein via a peptide linker. In some such compositions, the lysosomal alpha-glucosidase lacks the lysosomal alpha-glucosidase signal peptide and propeptide. In some such compositions, the lysosomal alpha-glucosidase comprises the sequence set forth in SEQ ID NO: 173. In some such compositions, the lysosomal alpha-glucosidase consists of the sequence set forth in SEQ ID NO: 173. In some such compositions, the lysosomal alpha-glucosidase coding sequence is codon-optimized and CpG-depleted. In some such compositions, the lysosomal alpha-glucosidase coding sequence is at least 90%, at least 91%, at least 92%, at least 93%, at least 94%, at least 95%, at least 96%, at least 97%, at least 98%, or at least 99% identical to any one of SEQ ID NOS: 174-182 and 205-212, optionally wherein the lysosomal alpha-glucosidase coding sequence is at least 90%, at least 91%, at least 92%, at least 93%, at least 94%, at least 95%, at least 96%, at least 97%, at least 98%, or at least 99% identical to SEQ ID NO: 176. In some such compositions, the lysosomal alpha-glucosidase coding sequence is at least 90%, at least 91%, at least 92%, at least 93%, at least 94%, at least 95%, at least 96%, at least 97%, at least 98%, or at least 99% identical to any one of SEQ ID NOS: 174-182 and 205-212 and encodes a lysosomal alpha-glucosidase protein comprising SEQ ID NO: 173, optionally wherein the lysosomal alpha-glucosidase coding sequence is at least 90%, at least 91%, at least 92%, at least 93%, at least 94%, at least 95%, at least 96%, at least 97%, at least 98%, or at least 99% identical to SEQ ID NO: 176 and encodes a lysosomal alpha-glucosidase protein comprising SEQ ID NO: 173. In some such compositions, the lysosomal alpha-glucosidase coding sequence is at least 90%, at least 91%, at least 92%, at least 93%, at least 94%, at least 95%, at least 96%, at least 97%, at least 98%, or at least 99% identical to any one of SEQ ID NOS: 174-182 and 205-212, is codon-optimized and CpG-depleted, and encodes a lysosomal alpha-glucosidase protein comprising SEQ ID NO: 173, optionally wherein the lysosomal alpha-glucosidase coding sequence is at least 90%, at least 91%, at least 92%, at least 93%, at least 94%, at least 95%, at least 96%, at least 97%, at least 98%, or at least 99% identical to SEQ ID NO: 176, is codon-optimized and CpG-depleted, and encodes a lysosomal alpha-glucosidase protein comprising SEQ ID NO: 173. In some such compositions, the lysosomal alpha-glucosidase coding sequence comprises the sequence set forth in any one of SEQ ID NOS: 174-182 and 205-212, optionally wherein the lysosomal alpha-glucosidase coding sequence comprises the sequence set forth in SEQ ID NO: 176. In some such compositions, the lysosomal alpha-glucosidase coding sequence consists of the sequence set forth in any one of SEQ ID NOS: 174-182 and 205-212, optionally wherein the lysosomal alpha-glucosidase coding sequence consists of the sequence set forth in SEQ ID NO: 176.

[0038] In another aspect, provided are compositions comprising a nucleic acid construct comprising a coding sequence for a multidomain therapeutic protein comprising a CD63-binding delivery domain fused to a lysosomal alpha-glucosidase, wherein the lysosomal alpha-glucosidase coding sequence is CpG-depleted relative to a wild type lysosomal alpha-glucosidase coding sequence. In some such compositions, the CD63-binding delivery domain is fused to the lysosomal alpha-glucosidase protein via a peptide linker. In some such compositions, the lysosomal alpha-glucosidase lacks the lysosomal alpha-glucosidase signal peptide and propeptide. In some such compositions, the lysosomal alpha-glucosidase comprises the sequence set forth in SEQ ID NO: 173. In some such compositions, the lysosomal alpha-glucosidase consists of the sequence set forth in SEQ ID NO: 173. In some such compositions, the lysosomal alpha-glucosidase coding sequence is codon-optimized and CpG-depleted. In some such compositions, the lysosomal alpha-glucosidase coding sequence is at least 90%, at least 91%, at least 92%, at least 93%, at least 94%, at least 95%, at least 96%, at least 97%, at least 98%, or at least 99% identical to any one of SEQ ID NOS: 174-182, optionally wherein the lysosomal alpha-glucosidase coding sequence is at least 90%, at least 91%, at least 92%, at least 93%, at least 94%, at least 95%, at least 96%, at least 97%, at least 98%, or at least 99% identical to SEQ ID NO: 176. In some such compositions, the lysosomal alpha-glucosidase coding sequence is at least 90%, at least 91%, at least 92%, at least 93%, at least 94%, at least 95%, at least 96%, at least 97%, at least 98%, or at least 99% identical to any one of SEQ ID NOS: 174-182 and encodes a lysosomal alpha-glucosidase protein comprising SEQ ID NO: 173, optionally wherein the lysosomal alpha-glucosidase coding sequence is at least 90%, at least 91%, at least 92%, at least 93%, at least 94%, at least 95%, at least 96%, at least 97%, at least 98%, or at least 99% identical to SEQ ID NO: 176 and encodes a lysosomal alpha-glucosidase protein comprising SEQ ID NO: 173. In some such compositions, the lysosomal alpha-glucosidase coding sequence is at least 90%, at least 91%, at least 92%, at least 93%, at least 94%, at least 95%, at least 96%, at least 97%, at least 98%, or at least 99% identical to any one of SEQ ID NOS: 174-182, is codon-optimized and CpG-depleted, and encodes a lysosomal alpha-glucosidase protein comprising SEQ ID NO: 173, optionally wherein the lysosomal alpha-glucosidase coding sequence is at least 90%, at least 91%, at least 92%, at least 93%, at least 94%, at least 95%, at least 96%, at least 97%, at least 98%, or at least 99% identical to SEQ ID NO: 176, is codon-optimized and CpG-depleted, and encodes a lysosomal alpha-glucosidase protein comprising SEQ ID NO: 173. In some such compositions, the lysosomal alpha-glucosidase coding sequence comprises the sequence set forth in any one of SEQ ID NOS: 174-182, optionally wherein the lysosomal alpha-glucosidase coding sequence comprises the sequence set forth in SEQ ID NO: 176. In some such compositions, the lysosomal alpha-glucosidase coding sequence consists of the sequence set forth in any one of SEQ ID NOS: 174-182, optionally wherein the lysosomal alpha-glucosidase coding sequence consists of the sequence set forth in SEQ ID NO: 176.

[0039] In some such compositions, the coding sequence for the CD63-binding delivery domain is codon-optimized or CpG-depleted. In some such compositions, the coding sequence for the CD63-binding delivery domain is codon-optimized and CpG-depleted. In some such compositions, the CD63-binding delivery domain comprises an anti-CD63 antigen-binding protein. In some such compositions, the CD63-binding delivery domain comprises an anti-CD63 antibody, antibody fragment, or single-chain variable fragment (scFv). In some such compositions, the CD63-binding delivery domain is the single-chain variable fragment (scFv). In some such compositions, the scFv comprises the sequence set forth in SEQ ID NO: 183. In some such compositions, the scFv consists of the sequence set forth in SEQ ID NO: 183. In some such compositions, the scFv coding sequence is at least 90%, at least 91%, at least 92%, at least 93%, at least 94%, at least 95%, at least 96%, at least 97%, at least 98%, or at least 99% identical to any one of SEQ ID NOS: 184-192, optionally wherein the scFv coding sequence is at least 90%, at least 91%, at least 92%, at least 93%, at least 94%, at least 95%, at least 96%, at least 97%, at least 98%, or at least 99% identical to SEQ ID NO: 186. In some such compositions, the scFv coding sequence is at least 90%, at least 91%, at least 92%, at least 93%, at least 94%, at least 95%, at least 96%, at least 97%, at least 98%, or at least 99% identical to any one of SEQ ID NOS: 184-192 and encodes an scFv comprising SEQ ID NO: 183, optionally wherein the scFv coding sequence is at least 90%, at least 91%, at least 92%, at least 93%, at least 94%, at least 95%, at least 96%, at least 97%, at least 98%, or at least 99% identical to SEQ ID NO: 186 and encodes an scFv comprising SEQ ID NO: 183. In some such compositions, the scFv coding sequence is at least 90%, at least 91%, at least 92%, at least 93%, at least 94%, at least 95%, at least 96%, at least 97%, at least 98%, or at least 99% identical to any one of SEQ ID NOS: 184-192, is codon-optimized and CpG-depleted, and encodes an scFv comprising SEQ ID NO: 183, optionally wherein the scFv coding sequence is at least 90%, at least 91%, at least 92%, at least 93%, at least 94%, at least 95%, at least 96%, at least 97%, at least 98%, or at least 99% identical to SEQ ID NO: 186, is codon-optimized and CpG-depleted, and encodes an scFv comprising SEQ ID NO: 183. In some such compositions, the scFv coding sequence comprises the sequence set forth in any one of SEQ ID NOS: 184-192, optionally wherein the scFv coding sequence comprises the sequence set forth in SEQ ID NO: 186. In some such compositions, the scFv coding sequence consists of the sequence set forth in any one of SEQ ID NOS: 184-192, optionally wherein the scFv coding sequence consists of the sequence set forth in SEQ ID NO: 186.

[0040] In some such compositions, the coding sequence for the multidomain therapeutic protein is codon-optimized or CpG-depleted. In some such compositions, the coding sequence for the multidomain therapeutic protein is codon-optimized and CpG-depleted. In some such compositions, the multidomain therapeutic protein comprises the sequence set forth in SEQ ID NO: 193. In some such compositions, the multidomain therapeutic protein consists of the sequence set forth in SEQ ID NO: 193. In some such compositions, the coding sequence for the multidomain therapeutic protein is at least 90%, at least 91%, at least 92%, at least 93%, at least 94%, at least 95%, at least 96%, at least 97%, at least 98%, or at least 99% identical to any one of SEQ ID NOS: 194-202, optionally wherein the coding sequence for the multidomain therapeutic protein is at least 90%, at least 91%, at least 92%, at least 93%, at least 94%, at least 95%, at least 96%, at least 97%, at least 98%, or at least 99% identical to SEQ ID NO: 196, optionally wherein the nucleic acid construct comprises a sequence at least 90%, at least 91%, at least 92%, at least 93%, at least 94%, at least 95%, at least 96%, at least 97%, at least 98%, or at least 99% identical to SEQ ID NO: 736. In some such compositions, the coding sequence for the multidomain therapeutic protein is at least 90%, at least 91%, at least 92%, at least 93%, at least 94%, at least 95%, at least 96%, at least 97%, at least 98%, or at least 99% identical to any one of SEQ ID NOS: 194-202, and the multidomain therapeutic protein comprises the sequence set forth in SEQ ID NO: 193, optionally wherein the coding sequence for the multidomain therapeutic protein is at least 90%, at least 91%, at least 92%, at least 93%, at least 94%, at least 95%, at least 96%, at least 97%, at least 98%, or at least 99% identical to SEQ ID NO: 196, and the multidomain therapeutic protein comprises the sequence set forth in SEQ ID NO: 193, optionally wherein the nucleic acid construct comprises a sequence at least 90%, at least 91%, at least 92%, at least 93%, at least 94%, at least 95%, at least 96%, at least 97%, at least 98%, or at least 99% identical to SEQ ID NO: 736, and the multidomain therapeutic protein comprises the sequence set forth in SEQ ID NO: 193. In some such compositions, the coding sequence for the multidomain therapeutic protein is at least 90%, at least 91%, at least 92%, at least 93%, at least 94%, at least 95%, at least 96%, at least 97%, at least 98%, or at least 99% identical to any one of SEQ ID NOS: 194-202 and is codon-optimized and CpG-depleted, and the multidomain therapeutic protein comprises the sequence set forth in SEQ ID NO: 193, optionally wherein the coding sequence for the multidomain therapeutic protein is at least 90%, at least 91%, at least 92%, at least 93%, at least 94%, at least 95%, at least 96%, at least 97%, at least 98%, or at least 99% identical to SEQ ID NO: 196 and is codon-optimized and CpG-depleted, and the multidomain therapeutic protein comprises the sequence set forth in SEQ ID NO: 193, optionally wherein the nucleic acid construct comprises a sequence at least 90%, at least 91%, at least 92%, at least 93%, at least 94%, at least 95%, at least 96%, at least 97%, at least 98%, or at least 99% identical to SEQ ID NO: 736, the coding sequence for the multidomain therapeutic protein is codon-optimized and CpG-depleted, and the multidomain therapeutic protein comprises the sequence set forth in SEQ ID NO: 193. In some such compositions, the coding sequence for the multidomain therapeutic protein comprises the sequence set forth in any one of SEQ ID NOS: 194-202, optionally wherein the coding sequence for the multidomain therapeutic protein comprises the sequence set forth in SEQ ID NO: 196, optionally wherein the nucleic acid construct comprises the sequence set forth in SEQ ID NO: 736. In some such compositions, the coding sequence for the multidomain therapeutic protein consists of the sequence set forth in any one of SEQ ID NOS: 194-202, optionally wherein the coding sequence for the multidomain therapeutic protein consists of the sequence set forth in SEQ ID NO: 196, optionally wherein the nucleic acid construct comprises the sequence set forth in SEQ ID NO: 736.

[0041] In some such compositions, the nucleic acid construct comprises a splice acceptor upstream of the coding sequence for the multidomain therapeutic protein. In some such compositions, the nucleic acid construct comprises a polyadenylation signal or sequence downstream of the coding sequence for the multidomain therapeutic protein. In some such compositions, the nucleic acid construct comprises a splice acceptor upstream of the coding sequence for the multidomain therapeutic protein, and the nucleic acid construct comprises a polyadenylation signal or sequence downstream of the coding sequence for the multidomain therapeutic protein. In some such compositions, the nucleic acid construct does not comprise a homology arm. In some such compositions, the nucleic acid construct comprises homology arms. In some such compositions, the nucleic acid construct does not comprise a promoter that drives the expression of the multidomain therapeutic protein. In some such compositions, the nucleic acid construct is single-stranded DNA or double-stranded DNA. In some such compositions, the nucleic acid construct is single-stranded DNA. In some such compositions, the nucleic acid construct comprises from 5′ to 3′: a splice acceptor, the coding sequence for the multidomain therapeutic protein, and a polyadenylation signal or sequence, wherein the coding sequence for the multidomain therapeutic protein comprises any one of SEQ ID NOS: 194-202, optionally wherein the coding sequence for the multidomain therapeutic protein comprises the sequence set forth in SEQ ID NO: 196, optionally wherein the nucleic acid construct comprises the sequence set forth in SEQ ID NO: 736, wherein the nucleic acid construct does not comprise a promoter that drives the expression of the multidomain therapeutic protein, and wherein the nucleic acid construct does not comprise a homology arm.

[0042] In some such compositions, the nucleic acid construct is in a nucleic acid vector or a lipid nanoparticle. In some such compositions, the nucleic acid construct is in the nucleic acid vector. In some such compositions, the nucleic acid vector is a viral vector. In some such compositions, the nucleic acid vector is an adeno-associated viral (AAV) vector, optionally wherein the nucleic acid construct is flanked by inverted terminal repeats (ITRs) on each end, optionally wherein the ITR on at least one end comprises, consists essentially of, or consists of SEQ ID NO: 160, and optionally wherein the ITR on each end comprises, consists essentially of, or consists of SEQ ID NO: 160. In some such compositions, the AAV vector is a single-stranded AAV (ssAAV) vector. In some such compositions, the AAV vector is derived from an AAV8 vector, an AAV3B vector, an AAV5 vector, an AAV6 vector, an AAV7 vector, an AAV9 vector, an AAVrh.74 vector, or an AAVhu.37 vector. In some such compositions, the AAV vector is a recombinant AAV8 (rAAV8) vector. In some such compositions, the AAV vector is a single-stranded rAAV8 vector. In some such compositions, the nucleic acid construct comprises from 5′ to 3′: a splice acceptor, the coding sequence for the multidomain therapeutic protein, and a polyadenylation signal or sequence, wherein the coding sequence for the multidomain therapeutic protein comprises any one of SEQ ID NOS: 194-202, optionally wherein the coding sequence for the multidomain therapeutic protein comprises the sequence set forth in SEQ ID NO: 196, optionally wherein the nucleic acid construct comprises the sequence set forth in SEQ ID NO: 736, wherein the nucleic acid construct does not comprise a promoter that drives the expression of the multidomain therapeutic protein, wherein the nucleic acid construct does not comprise a homology arm, and wherein the nucleic acid construct is in a single-stranded rAAV8 vector, optionally wherein the nucleic acid construct is flanked by inverted terminal repeats (ITRs) on each end, optionally wherein the ITR on at least one end comprises, consists essentially of, or consists of SEQ ID NO: 160, and optionally wherein the ITR on each end comprises, consists essentially of, or consists of SEQ ID NO: 160. In some such compositions, the nucleic acid construct is CpG-depleted.

[0043] In some such compositions, the composition further comprise a nuclease agent that targets a nuclease target site in a target genomic locus. In some such compositions, the target genomic locus is an albumin gene, optionally wherein the albumin gene is a human albumin gene. In some such compositions, the nuclease target site is in intron 1 of the albumin gene. In some such compositions, the nuclease agent comprises: (a) a zinc finger nuclease (ZFN); (b) a transcription activator-like effector nuclease (TALEN); or (c) (i) a Cas protein or a nucleic acid encoding the Cas protein; and (ii) a guide RNA or one or more DNAs encoding the guide RNA, wherein the guide RNA comprises a DNA-targeting segment that targets a guide RNA target sequence, and wherein the guide RNA binds to the Cas protein and targets the Cas protein to the guide RNA target sequence.

[0044] In some such compositions, the nuclease agent comprises: (a) a Cas protein or a nucleic acid encoding the Cas protein; and (b) a guide RNA or one or more DNAs encoding the guide RNA, wherein the guide RNA comprises a DNA-targeting segment that targets a guide RNA target sequence, and wherein the guide RNA binds to the Cas protein and targets the Cas protein to the guide RNA target sequence. In some such compositions, the guide RNA target sequence is in intron 1 of an albumin gene. In some such compositions, the albumin gene is a human albumin gene. In some such compositions, the DNA-targeting segment comprises at least 17, at least 18, at least 19, or at least 20 contiguous nucleotides of the sequence set forth in any one of SEQ ID NOS: 30-61, optionally wherein the DNA-targeting segment comprises at least 17, at least 18, at least 19, or at least 20 contiguous nucleotides of the sequence set forth in any one of SEQ ID NOS: 36, 30, 33, and 41. In some such compositions, the DNA-targeting segment is at least 90% or at least 95% identical to the sequence set forth in any one of SEQ ID NOS: 30-61, optionally wherein the DNA-targeting segment is at least 90% or at least 95% identical to the sequence set forth in any one of SEQ ID NOS: 36, 30, 33, and 41. In some such compositions, the DNA-targeting segment comprises any one of SEQ ID NOS: 30-61, optionally wherein the DNA-targeting segment comprises any one of SEQ ID NOS: 36, 30, 33, and 41. In some such compositions, the DNA-targeting segment consists of any one of SEQ ID NOS: 30-61, optionally wherein the DNA-targeting segment consists of any one of SEQ ID NOS: 36, 30, 33, and 41. In some such compositions, the guide RNA comprises any one of SEQ ID NOS: 62-125, optionally wherein the guide RNA comprises any one of SEQ ID NOS: 68, 100, 62, 94, 65, 97, 73, and 105. In some such compositions, the DNA-targeting segment comprises at least 17, at least 18, at least 19, or at least 20 contiguous nucleotides of SEQ ID NO: 36. In some such compositions, the DNA-targeting segment is at least 90% or at least 95% identical to SEQ ID NO: 36. In some such compositions, the DNA-targeting segment comprises SEQ ID NO: 36. In some such compositions, the DNA-targeting segment consists of SEQ ID NO: 36. In some such compositions, the guide RNA comprises SEQ ID NO: 68 or 100.

[0045] In some such compositions, the guide RNA in the form of RNA. In some such compositions, the guide RNA comprises at least one modification. In some such compositions, the at least one modification comprises a 2′-O-methyl-modified nucleotide. In some such compositions, the at least one modification comprises a phosphorothioate bond between nucleotides. In some such compositions, the at least one modification comprises a modification at one or more of the first five nucleotides at the 5′ end of the guide RNA. In some such compositions, the at least one modification comprises a modification at one or more of the last five nucleotides at the 3′ end of the guide RNA. In some such compositions, the at least one modification comprises phosphorothioate bonds between the first four nucleotides at the 5′ end of the guide RNA. In some such compositions, the at least one modification comprises phosphorothioate bonds between the last four nucleotides at the 3′ end of the guide RNA. In some such compositions, the at least one modification comprises 2′-O-methyl-modified nucleotides at the first three nucleotides at the 5′ end of the guide RNA. In some such compositions, the at least one modification comprises 2′-O-methyl-modified nucleotides at the last three nucleotides at the 3′ end of the guide RNA. In some such compositions, the at least one modification comprises: (i) phosphorothioate bonds between the first four nucleotides at the 5′ end of the guide RNA; (ii) phosphorothioate bonds between the last four nucleotides at the 3′ end of the guide RNA; (iii) 2′-O-methyl-modified nucleotides at the first three nucleotides at the 5′ end of the guide RNA; and (iv) 2′-O-methyl-modified nucleotides at the last three nucleotides at the 3′ end of the guide RNA. In some such compositions, the guide RNA is a single guide RNA (sgRNA). In some such compositions, the guide RNA in the form of RNA, the guide RNA comprises SEQ ID NO: 100, and the guide RNA comprises: (i) phosphorothioate bonds between the first four nucleotides at the 5′ end of the guide RNA; (ii) phosphorothioate bonds between the last four nucleotides at the 3′ end of the guide RNA; (iii) 2′-O-methyl-modified nucleotides at the first three nucleotides at the 5′ end of the guide RNA; and (iv) 2′-O-methyl-modified nucleotides at the last three nucleotides at the 3′ end of the guide RNA.

[0046] In some such compositions, the Cas protein is a Cas9 protein. In some such compositions, the Cas9 protein is derived from a Streptococcus pyogenes Cas9 protein, a Staphylococcus aureus Cas9 protein, a Campylobacter jejuni Cas9 protein, a Streptococcus thermophilus Cas9 protein, or a Neisseria meningitidis Cas9 protein. In some such compositions, the Cas protein is derived from a Streptococcus pyogenes Cas9 protein. In some such compositions, the Cas protein comprises the sequence set forth in SEQ ID NO: 11. In some such compositions, the nucleic acid encoding the Cas protein is codon-optimized for expression in a mammalian cell or a human cell. In some such compositions, the composition comprises the nucleic acid encoding the Cas protein, wherein the nucleic acid comprises an mRNA encoding the Cas protein. In some such compositions, the mRNA encoding the Cas protein comprises at least one modification. In some such compositions, the mRNA encoding the Cas protein is modified to comprise a modified uridine at one or more or all uridine positions. In some such compositions, the modified uridine is pseudouridine or N1-methyl-pseudouridine, optionally N1-methyl-pseudouridine. In some such compositions, the mRNA encoding the Cas protein is fully substituted with pseudouridine or N1-methyl-pseudouridine, optionally N1-methyl-pseudouridine. In some such compositions, the modified uridine is pseudouridine. In some such compositions, the mRNA encoding the Cas protein is fully substituted with pseudouridine. In some such compositions, the mRNA encoding the Cas protein comprises a 5′ cap. In some such compositions, the mRNA encoding the Cas protein comprises a polyadenylation sequence. In some such compositions, the mRNA encoding the Cas protein comprises the sequence set forth in SEQ ID NO: 226, 225, or 12. In some such compositions, the composition comprises the nucleic acid encoding the Cas protein, wherein the nucleic acid comprises an mRNA encoding the Cas protein, the mRNA encoding the Cas protein comprises the sequence set forth in SEQ ID NO: 226, 225, or 12, and the mRNA encoding the Cas protein is fully substituted with pseudouridine or N1-methyl-pseudouridine, optionally N1-methyl-pseudouridine, comprises a 5′ cap, and comprises a polyadenylation sequence. In some such compositions, the composition comprises the nucleic acid encoding the Cas protein, wherein the nucleic acid comprises an mRNA encoding the Cas protein, the mRNA encoding the Cas protein comprises the sequence set forth in SEQ ID NO: 226, 225, or 12, and the mRNA encoding the Cas protein is fully substituted with pseudouridine, comprises a 5′ cap, and comprises a polyadenylation sequence.

[0047] In some such compositions, the guide RNA in the form of RNA, and the guide RNA comprises SEQ ID NO: 68 or 100, and wherein the composition comprises the nucleic acid encoding the Cas protein, wherein the nucleic acid comprises an mRNA encoding the Cas protein, and the mRNA encoding the Cas protein comprises the sequence set forth in SEQ ID NO: 226, 225, or 12. In some such compositions, the nucleic acid construct comprises from 5′ to 3′: a splice acceptor, the coding sequence for the multidomain therapeutic protein, and a polyadenylation signal or sequence, wherein the coding sequence for the multidomain therapeutic protein comprises any one of SEQ ID NOS: 194-202, optionally wherein the coding sequence for the multidomain therapeutic protein comprises the sequence set forth in SEQ ID NO: 196, optionally wherein the nucleic acid construct comprises the sequence set forth in SEQ ID NO: 736, wherein the nucleic acid construct does not comprise a promoter that drives the expression of the multidomain therapeutic protein, wherein the nucleic acid construct does not comprise a homology arm, and wherein the nucleic acid construct is in a single-stranded rAAV8 vector, optionally wherein the nucleic acid construct is flanked by inverted terminal repeats (ITRs) on each end, optionally wherein the ITR on at least one end comprises, consists essentially of, or consists of SEQ ID NO: 160, and optionally wherein the ITR on each end comprises, consists essentially of, or consists of SEQ ID NO: 160. In some such compositions, the guide RNA in the form of RNA, the guide RNA comprises SEQ ID NO: 100, and the guide RNA comprises: (i) phosphorothioate bonds between the first four nucleotides at the 5′ end of the guide RNA; (ii) phosphorothioate bonds between the last four nucleotides at the 3′ end of the guide RNA; (iii) 2′-O-methyl-modified nucleotides at the first three nucleotides at the 5′ end of the guide RNA; and (iv) 2′-O-methyl-modified nucleotides at the last three nucleotides at the 3′ end of the guide RNA, and wherein the composition comprises the nucleic acid encoding the Cas protein, wherein the nucleic acid comprises an mRNA encoding the Cas protein, the mRNA encoding the Cas protein comprises the sequence set forth in SEQ ID NO: 226, 225, or 12, and the mRNA encoding the Cas protein is fully substituted with pseudouridine or N1-methyl-pseudouridine, optionally N1-methyl-pseudouridine, comprises a 5′ cap, and comprises a polyadenylation sequence. In some such compositions, the guide RNA in the form of RNA, the guide RNA comprises SEQ ID NO: 100, and the guide RNA comprises: (i) phosphorothioate bonds between the first four nucleotides at the 5′ end of the guide RNA; (ii) phosphorothioate bonds between the last four nucleotides at the 3′ end of the guide RNA; (iii) 2′-O-methyl-modified nucleotides at the first three nucleotides at the 5′ end of the guide RNA; and (iv) 2′-O-methyl-modified nucleotides at the last three nucleotides at the 3′ end of the guide RNA, and wherein the composition comprises the nucleic acid encoding the Cas protein, wherein the nucleic acid comprises an mRNA encoding the Cas protein, the mRNA encoding the Cas protein comprises the sequence set forth in SEQ ID NO: 226, 225, or 12, and the mRNA encoding the Cas protein is fully substituted with pseudouridine, comprises a 5′ cap, and comprises a polyadenylation sequence. In some such compositions, the nucleic acid construct comprises from 5′ to 3′: a splice acceptor, the coding sequence for the multidomain therapeutic protein, and a polyadenylation signal or sequence, wherein the coding sequence for the multidomain therapeutic protein comprises any one of SEQ ID NOS: 194-202, optionally wherein the coding sequence for the multidomain therapeutic protein comprises the sequence set forth in SEQ ID NO: 196, optionally wherein the nucleic acid construct comprises the sequence set forth in SEQ ID NO: 736, wherein the nucleic acid construct does not comprise a promoter that drives the expression of the multidomain therapeutic protein, wherein the nucleic acid construct does not comprise a homology arm, and wherein the nucleic acid construct is in a single-stranded rAAV8 vector, optionally wherein the nucleic acid construct is flanked by inverted terminal repeats (ITRs) on each end, optionally wherein the ITR on at least one end comprises, consists essentially of, or consists of SEQ ID NO: 160, and optionally wherein the ITR on each end comprises, consists essentially of, or consists of SEQ ID NO: 160.

[0048] In some such compositions, the Cas protein or the nucleic acid encoding the Cas protein and the guide RNA or the one or more DNAs encoding the guide RNA are associated with a lipid nanoparticle. In some such compositions, the lipid nanoparticle comprises a cationic lipid, a neutral lipid, a helper lipid, and a stealth lipid. In some such compositions, the cationic lipid is Lipid A ((9Z,12Z)-3-((4,4-bis(octyloxy)butanoyl)oxy)-2-((((3-(diethylamino)propoxy)carbonyl)oxy)methyl)propyl octadeca-9,12-dienoate). In some such compositions, the neutral lipid is distearoylphosphatidylcholine or 1,2-distearoyl-sn-glycero-3-phosphocholine (DSPC). In some such compositions, the helper lipid is cholesterol. In some such compositions, the stealth lipid is PEG2k-DMG. In some such compositions, the cationic lipid is Lipid A, the neutral lipid is DSPC, the helper lipid is cholesterol, and the stealth lipid is PEG2k-DMG. In some such compositions, the lipid nanoparticle comprises four lipids at the following molar ratios: about 50 mol% Lipid A, about 9 mol% DSPC, about 38 mol% cholesterol, and about 3 mol% PEG2k-DMG.

[0049] In some such compositions, the albumin gene is a human albumin gene, wherein the guide RNA in the form of RNA, and the guide RNA comprises SEQ ID NO: 68 or 100, wherein the composition comprises the nucleic acid encoding the Cas protein, wherein the nucleic acid comprises an mRNA encoding the Cas protein, and the mRNA encoding the Cas protein comprises the sequence set forth in SEQ ID NO: 226, 225, or 12, and wherein the guide RNA and the mRNA encoding the Cas protein are associated with a lipid nanoparticle comprising Lipid A, DSPC, cholesterol, and PEG2k-DMG, optionally at the following molar ratios: about 50 mol% Lipid A, about 9 mol% DSPC, about 38 mol% cholesterol, and about 3 mol% PEG2k-DMG. In some such compositions, the nucleic acid construct comprises from 5′ to 3′: a splice acceptor, the coding sequence for the multidomain therapeutic protein, and a polyadenylation signal or sequence, wherein the coding sequence for the multidomain therapeutic protein comprises any one of SEQ ID NOS: 194-202, optionally wherein the coding sequence for the multidomain therapeutic protein comprises the sequence set forth in SEQ ID NO: 196, optionally wherein the nucleic acid construct comprises the sequence set forth in SEQ ID NO: 736, wherein the nucleic acid construct does not comprise a promoter that drives the expression of the multidomain therapeutic protein, wherein the nucleic acid construct does not comprise a homology arm, and wherein the nucleic acid construct is in a single-stranded rAAV8 vector, optionally wherein the nucleic acid construct is flanked by inverted terminal repeats (ITRs) on each end, optionally wherein the ITR on at least one end comprises, consists essentially of, or consists of SEQ ID NO: 160, and optionally wherein the ITR on each end comprises, consists essentially of, or consists of SEQ ID NO: 160. In some such compositions, the albumin gene is a human albumin gene, wherein the guide RNA in the form of RNA, the guide RNA comprises SEQ ID NO: 100, and the guide RNA comprises: (i) phosphorothioate bonds between the first four nucleotides at the 5′ end of the guide RNA; (ii) phosphorothioate bonds between the last four nucleotides at the 3′ end of the guide RNA; (iii) 2′-O-methyl-modified nucleotides at the first three nucleotides at the 5′ end of the guide RNA; and (iv) 2′-O-methyl-modified nucleotides at the last three nucleotides at the 3′ end of the guide RNA, wherein the composition comprises the nucleic acid encoding the Cas protein, wherein the nucleic acid comprises an mRNA encoding the Cas protein, the mRNA encoding the Cas protein comprises the sequence set forth in SEQ ID NO: 226, 225, or 12, and the mRNA encoding the Cas protein is fully substituted with pseudouridine or N1-methyl-pseudouridine, optionally N1-methyl-pseudouridine, comprises a 5′ cap, and comprises a polyadenylation sequence, and wherein the guide RNA and the mRNA encoding the Cas protein are associated with a lipid nanoparticle comprising Lipid A, DSPC, cholesterol, and PEG2k-DMG, optionally at the following molar ratios: about 50 mol% Lipid A, about 9 mol% DSPC, about 38 mol% cholesterol, and about 3 mol% PEG2k-DMG. In some such compositions, the albumin gene is a human albumin gene, wherein the guide RNA in the form of RNA, the guide RNA comprises SEQ ID NO: 100, and the guide RNA comprises: (i) phosphorothioate bonds between the first four nucleotides at the 5′ end of the guide RNA; (ii) phosphorothioate bonds between the last four nucleotides at the 3′ end of the guide RNA; (iii) 2′-O-methyl-modified nucleotides at the first three nucleotides at the 5′ end of the guide RNA; and (iv) 2′-O-methyl-modified nucleotides at the last three nucleotides at the 3′ end of the guide RNA, wherein the composition comprises the nucleic acid encoding the Cas protein, wherein the nucleic acid comprises an mRNA encoding the Cas protein, the mRNA encoding the Cas protein comprises the sequence set forth in SEQ ID NO: 226, 225, or 12, and the mRNA encoding the Cas protein is fully substituted with pseudouridine, comprises a 5′ cap, and comprises a polyadenylation sequence, and wherein the guide RNA and the mRNA encoding the Cas protein are associated with a lipid nanoparticle comprising Lipid A, DSPC, cholesterol, and PEG2k-DMG, optionally at the following molar ratios: about 50 mol% Lipid A, about 9 mol% DSPC, about 38 mol% cholesterol, and about 3 mol% PEG2k-DMG. In some such compositions, the nucleic acid construct comprises from 5′ to 3′: a splice acceptor, the coding sequence for the multidomain therapeutic protein, and a polyadenylation signal or sequence, wherein the coding sequence for the multidomain therapeutic protein comprises any one of SEQ ID NOS: 194-202, optionally wherein the coding sequence for the multidomain therapeutic protein comprises the sequence set forth in SEQ ID NO: 196, optionally wherein the nucleic acid construct comprises the sequence set forth in SEQ ID NO: 736, wherein the nucleic acid construct does not comprise a promoter that drives the expression of the multidomain therapeutic protein, wherein the nucleic acid construct does not comprise a homology arm, and wherein the nucleic acid construct is in a single-stranded rAAV8 vector, optionally wherein the nucleic acid construct is flanked by inverted terminal repeats (ITRs) on each end, optionally wherein the ITR on at least one end comprises, consists essentially of, or consists of SEQ ID NO: 160, and optionally wherein the ITR on each end comprises, consists essentially of, or consists of SEQ ID NO: 160.

[0050] In some such compositions, the composition is for use in a method of inserting the nucleic acid encoding the multidomain therapeutic protein into a target genomic locus in a cell or a population of cells. In some such compositions, the composition is for use in a method of expressing the multidomain therapeutic protein from a target genomic locus in a cell or a population of cells. In some such compositions, the composition is for use in a method of expressing the multidomain therapeutic protein in a cell or a population of cells. In some such compositions, the composition is for use in a method of inserting the nucleic acid encoding the multidomain therapeutic protein into a target genomic locus in a cell or a population of cells in a subject. In some such compositions, the composition is for use in a method of expressing the multidomain therapeutic protein from a target genomic locus in a cell or a population of cells in a subject. In some such compositions, the composition is for use in a method of expressing the multidomain therapeutic protein in a cell or a population of cells in a subject. In some such compositions, the cell is a neonatal cell and the population of cells is a population of neonatal cells. In some such compositions, the cell is a not a neonatal cell and the population of cells is not a population of neonatal cells. In some such compositions, the composition is for use in a method of treating a lysosomal alpha-glucosidase deficiency in a subject in need thereof. In some such compositions, the composition is for use in a method of reducing glycogen accumulation in a tissue in a subject in need thereof. In some such compositions, the composition is for use in a method of treating Pompe disease in a subject in need thereof. In some such compositions, the composition is for use in a method of preventing or reducing the onset of a sign or symptom of Pompe disease in a neonatal subject in need thereof. In some such compositions, the subject is a neonatal subject. In some such compositions, the subject is not a neonatal subject.

[0051] In another aspect, provided is a cell comprising any of the above compositions. In some such cells, the nucleic acid construct is integrated into a target genomic locus, and wherein the multidomain therapeutic protein is expressed from the target genomic locus, or wherein the nucleic acid construct is integrated into intron 1 of an endogenous albumin locus, and wherein the multidomain therapeutic protein is expressed from the endogenous albumin locus. In some such cells, the cell is a human cell. In some such cells, the cell is a liver cell. In some such cells, the liver cell is a hepatocyte. In some such cells, the cell is a neonatal cell. In some such cells, the neonatal cell is from a human neonatal subject within 24 weeks after birth. In some such cells, the neonatal cell is from a human neonatal subject within 12 weeks after birth. In some such cells, the neonatal cell is from a human neonatal subject within 8 weeks after birth. In some such cells, the neonatal cell is from a human neonatal subject within 4 weeks after birth. In some such cells, the cell is not a neonatal cell. In some such cells, the cell is in vivo. In some such cells, the cell is in vitro or ex vivo.

[0052] In another aspect, provided are methods of inserting a nucleic acid encoding a multidomain therapeutic protein comprising a delivery domain fused to a lysosomal alpha-glucosidase into a target genomic locus in a cell or a population of cells, optionally wherein the delivery domain is a CD63-binding delivery domain or a TfR-binding delivery domain. Some such methods comprise administering to the cell or the population of cells any of the above compositions, optionally wherein the delivery domain is a CD63-binding delivery domain or a TfR-binding delivery domain, wherein the nuclease agent cleaves the nuclease target site in the target genomic locus, and the nucleic acid construct is inserted into the target genomic locus. In another aspect, provided are methods of inserting a nucleic acid encoding a multidomain therapeutic protein comprising a CD63-binding delivery domain fused to a lysosomal alpha-glucosidase into a target genomic locus in a cell or a population of cells. Some such methods comprise administering to the cell or the population of cells any of the above compositions, wherein the nuclease agent cleaves the nuclease target site in the target genomic locus, and the nucleic acid construct is inserted into the target genomic locus. In another aspect, provided are methods of expressing a multidomain therapeutic protein comprising a delivery domain fused to a lysosomal alpha-glucosidase in a cell or a population of cells, optionally wherein the delivery domain is a CD63-binding delivery domain or a TfR-binding delivery domain. Some such methods comprise administering to the cell or the population of cells any of the above compositions, optionally wherein the delivery domain is a CD63-binding delivery domain or a TfR-binding delivery domain, wherein the coding sequence for the multidomain therapeutic protein is operably linked to a promoter in the nucleic acid construct and is expressed in the cell or population of cells. In another aspect, provided are methods of expressing a multidomain therapeutic protein comprising a delivery domain fused to a lysosomal alpha-glucosidase from a target genomic locus in a cell or a population of cells, optionally wherein the delivery domain is a CD63-binding delivery domain or a TfR-binding delivery domain. Some such methods comprise administering to the cell or the population of cells any of the above compositions, optionally wherein the delivery domain is a CD63-binding delivery domain or a TfR-binding delivery domain, wherein the nuclease agent cleaves the nuclease target site in the target genomic locus, the nucleic acid construct is inserted into the target genomic locus to create a modified target genomic locus, and the multidomain therapeutic protein comprising the delivery domain fused to the lysosomal alpha-glucosidase is expressed from the modified target genomic locus. In another aspect, provided are methods of expressing a multidomain therapeutic protein comprising a CD63-binding delivery domain fused to a lysosomal alpha-glucosidase in a cell or a population of cells. Some such methods comprise administering to the cell or the population of cells any of the above compositions, wherein the coding sequence for the multidomain therapeutic protein is operably linked to a promoter in the nucleic acid construct and is expressed in the cell or population of cells. In another aspect, provided are methods of expressing a multidomain therapeutic protein comprising a CD63-binding delivery domain fused to a lysosomal alpha-glucosidase from a target genomic locus in a cell or a population of cells. Some such methods comprise administering to the cell or the population of cells any of the above compositions, wherein the nuclease agent cleaves the nuclease target site in the target genomic locus, the nucleic acid construct is inserted into the target genomic locus to create a modified target genomic locus, and the multidomain therapeutic protein comprising the CD63-binding delivery domain fused to the lysosomal alpha-glucosidase is expressed from the modified target genomic locus. In some such methods, the cell is a liver cell or the population of cells is a population of liver cells. In some such methods, the cell is a hepatocyte or the population of cells is a population of hepatocytes. In some such methods, the cell is a human cell or the population of cells is a population of human cells. In some such methods, the cell is a neonatal cell or the population of cells is a population of neonatal cells. In some such methods, the neonatal cell or the population of neonatal cells is from a human neonatal subject within 24 weeks after birth. In some such methods, the neonatal cell or the population of neonatal cells is from a human neonatal subject within 12 weeks after birth. In some such methods, the neonatal cell or the population of neonatal cells is from a human neonatal subject within 8 weeks after birth. In some such methods, the neonatal cell or the population of neonatal cells is from a human neonatal subject within 4 weeks after birth. In some such methods, the cell is not a neonatal cell or the population of cells is not a population of neonatal cells. In some such methods, the cell is in vitro or ex vivo or the population of cells is in vitro or ex vivo. In some such methods, the cell is in vivo in a subject or the population of cells is in vivo in a subject.

[0053] In another aspect, provided are methods of inserting a nucleic acid encoding a multidomain therapeutic protein comprising a delivery domain fused to a lysosomal alpha-glucosidase into a target genomic locus in a cell or a population of cells in a subject, optionally wherein the delivery domain is a CD63-binding delivery domain or a TfR-binding delivery domain. Some such methods comprise administering to the subject any of the above compositions, optionally wherein the delivery domain is a CD63-binding delivery domain or a TfR-binding delivery domain, wherein the nuclease agent cleaves the nuclease target site in the target genomic locus, and the nucleic acid construct is inserted into the target genomic locus. In another aspect, provided are methods of inserting a nucleic acid encoding a multidomain therapeutic protein comprising a CD63-binding delivery domain fused to a lysosomal alpha-glucosidase into a target genomic locus in a cell or a population of cells in a subject. Some such methods comprise administering to the subject any of the above compositions, wherein the nuclease agent cleaves the nuclease target site in the target genomic locus, and the nucleic acid construct is inserted into the target genomic locus. In another aspect, provided are methods of expressing a multidomain therapeutic protein comprising a delivery domain fused to a lysosomal alpha-glucosidase protein in a cell or a population of cells in a subject, optionally wherein the delivery domain is a CD63-binding delivery domain or a TfR-binding delivery domain. Some such methods comprise administering to the subject any of the above compositions, optionally wherein the delivery domain is a CD63-binding delivery domain or a TfR-binding delivery domain, wherein the coding sequence for the multidomain therapeutic protein is operably linked to a promoter in the nucleic acid construct and is expressed in the cell. In another aspect, provided are methods of expressing a multidomain therapeutic protein comprising a delivery domain fused to a lysosomal alpha-glucosidase protein from a target genomic locus in a cell or a population of cells in a subject, optionally wherein the delivery domain is a CD63-binding delivery domain or a TfR-binding delivery domain. Some such methods comprise administering to the subject any of the above compositions, optionally wherein the delivery domain is a CD63-binding delivery domain or a TfR-binding delivery domain, wherein the nuclease agent cleaves the nuclease target site in the target genomic locus, the nucleic acid construct is inserted into the target genomic locus to create a modified target genomic locus, and the multidomain therapeutic protein comprising the delivery domain fused to the lysosomal alpha-glucosidase is expressed from the modified target genomic locus. In another aspect, provided are methods of expressing a multidomain therapeutic protein comprising a CD63-binding delivery domain fused to a lysosomal alpha-glucosidase protein in a cell or a population of cells in a subject. Some such methods comprise administering to the subject any of the above compositions, wherein the coding sequence for the multidomain therapeutic protein is operably linked to a promoter in the nucleic acid construct and is expressed in the cell. In another aspect, provided are methods of expressing a multidomain therapeutic protein comprising a CD63-binding delivery domain fused to a lysosomal alpha-glucosidase protein from a target genomic locus in a cell or a population of cells in a subject. Some such methods comprise administering to the subject any of the above compositions, wherein the nuclease agent cleaves the nuclease target site in the target genomic locus, the nucleic acid construct is inserted into the target genomic locus to create a modified target genomic locus, and the multidomain therapeutic protein comprising the CD63-binding delivery domain fused to the lysosomal alpha-glucosidase is expressed from the modified target genomic locus. In some such methods, the expressed multidomain therapeutic protein is delivered to and internalized by skeletal muscle and heart tissue in the subject. In some such methods, the cell is a liver cell or the population of cells is a population of liver cells. In some such methods, the cell is a hepatocyte or the population of cells is a population of hepatocytes. In some such methods, the cell is a human cell or the population of cells is a population of human cells. In some such methods, the cell is a neonatal cell or the population of cells is a population of neonatal cells. In some such methods, the neonatal cell or the population of neonatal cells is from a human neonatal subject within 24 weeks after birth. In some such methods, the neonatal cell or the population of neonatal cells is from a human neonatal subject within 12 weeks after birth. In some such methods, the neonatal cell or the population of neonatal cells is from a human neonatal subject within 8 weeks after birth. In some such methods, the neonatal cell or the population of neonatal cells is from a human neonatal subject within 4 weeks after birth. In some such methods, the cell is not a neonatal cell or the population of cells is not a population of neonatal cells.

[0054] In another aspect, provided are methods of treating a lysosomal alpha-glucosidase deficiency in a subject in need thereof. Some such methods comprise administering to the subject any of the above compositions, wherein the coding sequence for the multidomain therapeutic protein is operably linked to a promoter in the nucleic acid construct and is expressed in the subject, optionally wherein the delivery domain is a CD63-binding delivery domain or a TfR-binding delivery domain. Some such methods comprise administering to the subject any of the above compositions, wherein the nuclease agent cleaves the nuclease target site in the target genomic locus, the nucleic acid construct is inserted into the target genomic locus to create a modified target genomic locus, and the multidomain therapeutic protein comprising the delivery domain fused to the lysosomal alpha-glucosidase is expressed from the modified target genomic locus, optionally wherein the delivery domain is a CD63-binding delivery domain or a TfR-binding delivery domain. Some such methods comprise administering to the subject any of the above compositions, wherein the coding sequence for the multidomain therapeutic protein is operably linked to a promoter in the nucleic acid construct and the multidomain therapeutic protein comprising the CD63-binding delivery domain fused to the lysosomal alpha-glucosidase is expressed in the subject. Some such methods comprise administering to the subject any of the above compositions, wherein the nuclease agent cleaves the nuclease target site in the target genomic locus, the nucleic acid construct is inserted into the target genomic locus to create a modified target genomic locus, and the multidomain therapeutic protein comprising the CD63-binding delivery domain fused to the lysosomal alpha-glucosidase is expressed from the modified target genomic locus. In another aspect, provided are methods of reducing glycogen accumulation in a tissue in a subject in need thereof. Some such methods comprise administering to the subject any of the above compositions, wherein the coding sequence for the multidomain therapeutic protein is operably linked to a promoter in the nucleic acid construct and is expressed in the subject and reduces glycogen accumulation in the tissue, optionally wherein the delivery domain is a CD63-binding delivery domain or a TfR-binding delivery domain. Some such methods comprise administering to the subject any of the above compositions, wherein the nuclease agent cleaves the nuclease target site in the target genomic locus, the nucleic acid construct is inserted into the target genomic locus to create a modified target genomic locus, and the multidomain therapeutic protein comprising the delivery domain fused to the lysosomal alpha-glucosidase is expressed from the modified target genomic locus and reduces glycogen accumulation in the tissue, optionally wherein the delivery domain is a CD63-binding delivery domain or a TfR-binding delivery domain. Some such methods comprise administering to the subject any of the above compositions, wherein the coding sequence for the multidomain therapeutic protein is operably linked to a promoter in the nucleic acid construct and the multidomain therapeutic protein comprising the CD63-binding delivery domain fused to the lysosomal alpha-glucosidase is expressed in the subject and reduces glycogen accumulation in the tissue, optionally wherein the delivery domain is a CD63-binding delivery domain or a TfR-binding delivery domain. Some such methods comprise administering to the subject any of the above compositions, wherein the nuclease agent cleaves the nuclease target site in the target genomic locus, the nucleic acid construct is inserted into the target genomic locus to create a modified target genomic locus, and the multidomain therapeutic protein comprising the CD63-binding delivery domain fused to the lysosomal alpha-glucosidase is expressed from the modified target genomic locus and reduces glycogen accumulation in the tissue. In some such methods, the subject has Pompe disease. In another aspect, provided are methods of treating Pompe disease in a subject in need thereof. Some such methods comprise administering to the subject any of the above compositions, wherein the coding sequence for the multidomain therapeutic protein is operably linked to a promoter in the nucleic acid construct and is expressed in the subject, thereby treating the Pompe disease, optionally wherein the delivery domain is a CD63-binding delivery domain or a TfR-binding delivery domain. Some such methods comprise administering to the subject any of the above compositions, wherein the nuclease agent cleaves the nuclease target site in the target genomic locus, the nucleic acid construct is inserted into the target genomic locus to create a modified target genomic locus, and the multidomain therapeutic protein comprising the delivery domain fused to the lysosomal alpha-glucosidase is expressed from the modified target genomic locus, thereby treating the Pompe disease, optionally wherein the delivery domain is a CD63-binding delivery domain or a TfR-binding delivery domain. Some such methods comprise administering to the subject any of the above compositions, wherein the coding sequence for the multidomain therapeutic protein is operably linked to a promoter in the nucleic acid construct and the multidomain therapeutic protein comprising the CD63-binding delivery domain fused to the lysosomal alpha-glucosidase is expressed in the subject, thereby treating the Pompe disease. Some such methods comprise administering to the subject any of the above compositions, wherein the nuclease agent cleaves the nuclease target site in the target genomic locus, the nucleic acid construct is inserted into the target genomic locus to create a modified target genomic locus, and the multidomain therapeutic protein comprising the CD63-binding delivery domain fused to the lysosomal alpha-glucosidase is expressed from the modified target genomic locus, thereby treating the Pompe disease. In some such methods, the Pompe disease is infantile-onset Pompe disease. In some such methods, the Pompe disease is late-onset Pompe disease.

[0055] In some such methods, the subject is a neonatal subject. In some such methods, the neonatal subject is a human subject within 24 weeks after birth. In some such methods, the neonatal subject is a human subject within 12 weeks after birth. In some such methods, the neonatal subject is a human subject within 8 weeks after birth. In some such methods, the neonatal subject is a human subject within 4 weeks after birth. In some such methods, the subject is not a neonatal subject. In some such methods, the method results in a therapeutically effective level of circulating multidomain therapeutic protein or lysosomal alpha-glucosidase in the subject. In some such methods, the method reduces glycogen accumulation in skeletal muscle, heart tissue, or central nervous system tissue in the subject. In some such methods, the method reduces glycogen accumulation in skeletal muscle and heart tissue in the subject. In some such methods, the method results in reduced glycogen levels in skeletal muscle and/or heart tissue in the subject comparable to wild type levels at the same age. In some such methods, the method improves muscle strength in the subject or prevents loss of muscle strength in the subject compared to a control subject. In some such methods, the method results in the subject having muscle strength comparable to wild type levels at the same age.

[0056] In another aspect, provided are methods of preventing or reducing the onset of a sign or symptom of Pompe disease in a subject in need thereof. Some such methods comprise administering to the subject any of the above compositions, wherein the coding sequence for the multidomain therapeutic protein is operably linked to a promoter in the nucleic acid construct and is expressed in the subject, thereby preventing or reducing the onset of a sign or symptom of the Pompe disease in the subject, optionally wherein the delivery domain is a CD63-binding delivery domain or a TfR-binding delivery domain. Some such methods comprise administering to the subject any of the above compositions, wherein the nuclease agent cleaves the nuclease target site, the nucleic acid construct is inserted into the target genomic locus to create a modified target genomic locus, and the multidomain therapeutic protein comprising the delivery domain fused to the lysosomal alpha-glucosidase is expressed from the modified target genomic locus, thereby preventing or reducing the onset of a sign or symptom of the Pompe disease in the subject, optionally wherein the delivery domain is a CD63-binding delivery domain or a TfR-binding delivery domain. Some such methods comprise administering to the subject any of the above compositions, wherein the coding sequence for the multidomain therapeutic protein is operably linked to a promoter in the nucleic acid construct and the multidomain therapeutic protein comprising the CD63-binding delivery domain fused to the lysosomal alpha-glucosidase is expressed in the subject, thereby preventing or reducing the onset of a sign or symptom of the Pompe disease in the subject. Some such methods comprise administering to the subject any of the above compositions, wherein the nuclease agent cleaves the nuclease target site, the nucleic acid construct is inserted into the target genomic locus to create a modified target genomic locus, and the multidomain therapeutic protein comprising the CD63-binding delivery domain fused to the lysosomal alpha-glucosidase is expressed from the modified target genomic locus, thereby preventing or reducing the onset of a sign or symptom of the Pompe disease in the subject. In some such methods, the Pompe disease is infantile-onset Pompe disease. In some such methods, the Pompe disease is late-onset Pompe disease. In some such methods, the method results in a therapeutically effective level of circulating multidomain therapeutic protein or lysosomal alpha-glucosidase in the subject. In some such methods, the method prevents or reduces glycogen accumulation in skeletal muscle, heart, or central nervous system tissue in the subject. In some such methods, the method prevents or reduces glycogen accumulation in skeletal muscle, heart, and central nervous system tissue in the subject. In some such methods, the subject is a neonatal subject. In some such methods, the neonatal subject is a human subject within 24 weeks after birth. In some such methods, the neonatal subject is a human subject within 12 weeks after birth. In some such methods, the neonatal subject is a human subject within 8 weeks after birth. In some such methods, the neonatal subject is a human subject within 4 weeks after birth. In some such methods, the subject is not a neonatal subject.

[0057] In some such methods, the method results in increased expression of the multidomain therapeutic protein in the subject compared to a method comprising administering an episomal expression vector encoding the multidomain therapeutic protein to a control subject. In some such methods, the method results in increased serum levels of the multidomain therapeutic protein in the subject compared to a method comprising administering an episomal expression vector encoding the multidomain therapeutic protein to a control subject. In some such methods, the method results in serum levels of the multidomain therapeutic protein in the subject of at least about 1 µg/mL, at least about 2 µg/mL, at least about 3 µg/mL, at least about 4 µg/mL, at least about 5 µg/mL, at least about 6 µg/mL, at least about 7 µg/mL, at least about 8 µg/mL, at least about 9 µg/mL, or at least about 10 µg/mL. In some such methods, the method results in serum levels of the multidomain therapeutic protein in the subject of at least about 2 µg/mL or at least about 5 µg/mL. In some such methods, the method results in serum levels of the multidomain therapeutic protein in the subject of between about 2 µg/mL and about 30 µg/mL or between about 2 µg/mL and about 20 µg/mL. In some such methods, the method results in serum levels of the multidomain therapeutic protein in the subject of between about 5 µg/mL and about 30 µg/mL or between about 5 µg/mL and about 20 µg/mL. In some such methods, the method achieves lysosomal alpha-glucosidase activity levels of at least about 40% of normal, at least about 45% of normal, at least about 50%, at least about 60%, at least about 70%, at least about 80%, at least about 90%, or 100% of normal. In some such methods, the subject has infantile-onset Pompe disease, and the method achieves lysosomal alpha-glucosidase expression or activity levels of at least about 1% or more than about 1% of normal. In some such methods, the subject has late-onset Pompe disease, and the method achieves lysosomal alpha-glucosidase expression or activity levels of at least about 40% of normal or more than about 40% of normal. In some such methods, the method increases lysosomal alpha-glucosidase activity over the subject’s baseline lysosomal alpha-glucosidase activity by at least about 1%, at least about 5%, at least about 10%, at least about 15%, at least about 20%, at least about 25%, at least about 30%, at least about 35%, at least about 40%, at least about 45%, at least about 50%, at least about 60%, at least about 70%, at least about 80%, at least about 90%, or at least about 100%. In some such methods, the expression or activity of the multidomain therapeutic protein is at least 50% of the expression or activity of the multidomain therapeutic protein at a peak level of expression measured for the subject at six months or 24 weeks after the administering. In some such methods, the expression or activity of the multidomain therapeutic protein is at least 50% of the expression or activity of the multidomain therapeutic protein at a peak level of expression measured for the subject at one year after the administering. In some such methods, the expression or activity of the multidomain therapeutic protein is at least 60% of the expression or activity of the multidomain therapeutic protein at a peak level of expression measured for the subject at six months or 24 weeks after the administering. In some such methods, the expression or activity of the multidomain therapeutic protein is at least 50% of the expression or activity of the multidomain therapeutic protein at a peak level of expression measured for the subject at two years after the administering. In some such methods, the expression or activity of the multidomain therapeutic protein is at least 60% of the expression or activity of the multidomain therapeutic protein at a peak level of expression measured for the subject at two years after the administering. In some such methods, the expression or activity of the multidomain therapeutic protein is at least 60% of the expression or activity of the multidomain therapeutic protein at a peak level of expression measured for the subject at six months or 24 weeks after the administering.

[0058] In some such methods, the method further comprises assessing preexisting AAV immunity in the subject prior to administering the nucleic acid construct to the subject. In some such methods, the preexisting AAV immunity is preexisting AAV8 immunity. In some such methods, assessing preexisting AAV immunity comprises assessing immunogenicity using a total antibody immune assay or a neutralizing antibody assay.

[0059] In some such methods, the nucleic acid construct is administered simultaneously with the nuclease agent or the one or more nucleic acids encoding the nuclease agent. In some such methods, the nucleic acid construct is not administered simultaneously with the nuclease agent or the one or more nucleic acids encoding the nuclease agent. In some such methods, the nucleic acid construct is administered prior to the nuclease agent or the one or more nucleic acids encoding the nuclease agent. In some such methods, the nucleic acid construct is administered after the nuclease agent or the one or more nucleic acids encoding the nuclease agent.

[0060] In some such methods, the subject is a human subject. In some such methods, the subject is a neonatal subject. In some such methods, the neonatal subject is a human subject within 24 weeks after birth. In some such methods, the neonatal subject is a human subject within 12 weeks after birth. In some such methods, the neonatal subject is a human subject within 8 weeks after birth. In some such methods, the neonatal subject is a human subject within 4 weeks after birth. In some such methods, the subject is not a neonatal subject.

[0061] Nucleic acid constructs and compositions that allow insertion of a multidomain therapeutic protein (e.g., GAA fusion protein) coding sequence into a target genomic locus such as an endogenous ALB locus and/or expression of the multidomain therapeutic protein (e.g., GAA fusion protein) coding sequence are provided. The nucleic acid constructs and compositions can be used in methods of integrating or inserting a multidomain therapeutic protein (e.g., GAA fusion protein) nucleic acid into a target genomic locus in a cell or a population of cells or a subject, methods of expressing a multidomain therapeutic protein (e.g., GAA fusion protein) in a cell or a population of cells or a subject, methods of reducing glycogen accumulation in a cell or a population of cells or a subject, and methods of treating Pompe disease or GAA deficiency in a subject, and method of preventing or reducing the onset of a sign or symptom of Pompe disease in a subject such as subjects with reduced GAA activity or expression and in a subject diagnosed with Pompe disease, including neonatal cells and subjects. In some embodiments the cell, population of cells, or subject is a neonatal cell, a neonatal population of cells, or a neonatal subject

[0062] In one aspect, provided are methods of inserting a nucleic acid encoding a multidomain therapeutic protein comprising a TfR-binding delivery domain fused to a lysosomal alpha-glucosidase into a target genomic locus in a neonatal cell or a population of neonatal cells. Some such methods comprise administering to the neonatal cell or the population of neonatal cells: (a) a nucleic acid construct comprising a coding sequence for the multidomain therapeutic protein comprising the TfR-binding delivery domain fused to the lysosomal alpha-glucosidase; and (b) a nuclease agent or one or more nucleic acids encoding the nuclease agent, wherein the nuclease agent targets a nuclease target site in the target genomic locus, wherein the nuclease agent cleaves the nuclease target site, and the nucleic acid construct is inserted into the target genomic locus. In another aspect, provided are methods of expressing a multidomain therapeutic protein comprising a TfR-binding delivery domain fused to a lysosomal alpha-glucosidase in a neonatal cell or a population of neonatal cells. In another aspect, provided are methods of expressing a multidomain therapeutic protein comprising a TfR-binding delivery domain fused to a lysosomal alpha-glucosidase from a target genomic locus in a neonatal cell or a population of neonatal cells. Some such methods comprise administering to the neonatal cell or the population of neonatal cells: (a) a nucleic acid construct comprising a coding sequence for the multidomain therapeutic protein comprising the TfR-binding delivery domain fused to the lysosomal alpha-glucosidase; and (b) a nuclease agent or one or more nucleic acids encoding the nuclease agent, wherein the nuclease agent targets a nuclease target site in the target genomic locus, wherein the nuclease agent cleaves the nuclease target site, the nucleic acid construct is inserted into the target genomic locus to create a modified target genomic locus, and the multidomain therapeutic protein comprising the TfR-binding delivery domain fused to the lysosomal alpha-glucosidase is expressed from the modified target genomic locus. In some such methods, the neonatal cell is a liver cell or the population of neonatal cells is a population of liver cells. In some such methods, the neonatal cell is a hepatocyte or the population of neonatal cells is a population of hepatocytes. In some such methods, the neonatal cell is a human cell or the population of neonatal cells is a population of human cells. In some such methods, the neonatal cell or the population of neonatal cells is from a human neonatal subject within 24 weeks after birth. In some such methods, the neonatal cell or the population of neonatal cells is from a human neonatal subject within 12 weeks after birth. In some such methods, the neonatal cell or the population of neonatal cells is from a human neonatal subject within 8 weeks after birth. In some such methods, the neonatal cell or the population of neonatal cells is from a human neonatal subject within 4 weeks after birth. In some such methods, the neonatal cell is in vitro or ex vivo or the population of neonatal cells is in vitro or ex vivo. In some such methods, the neonatal cell is in vivo in a neonatal subject or the population of neonatal cells is in vivo in a neonatal subject.

[0063] In another aspect, provided are methods of inserting a nucleic acid encoding a multidomain therapeutic protein comprising a TfR-binding delivery domain fused to a lysosomal alpha-glucosidase into a target genomic locus in a neonatal cell or a population of neonatal cells in a neonatal subject. Some such methods comprise administering to the neonatal subject: (a) a nucleic acid construct comprising a coding sequence for the multidomain therapeutic protein comprising the TfR-binding delivery domain fused to the lysosomal alpha-glucosidase; and (b) a nuclease agent or one or more nucleic acids encoding the nuclease agent, wherein the nuclease agent targets a nuclease target site in the target genomic locus, wherein the nuclease agent cleaves the nuclease target site, and the nucleic acid construct is inserted into the target genomic locus. In another aspect, provided are methods of expressing a multidomain therapeutic protein comprising a TfR-binding delivery domain fused to a lysosomal alpha-glucosidase protein in a neonatal cell or a population of neonatal cells in a neonatal subject. In another aspect, provided are methods of expressing a multidomain therapeutic protein comprising a TfR-binding delivery domain fused to a lysosomal alpha-glucosidase protein from a target genomic locus in a neonatal cell or a population of neonatal cells in a neonatal subject. Some such methods comprise administering to the neonatal subject: (a) a nucleic acid construct comprising a coding sequence for the multidomain therapeutic protein comprising the TfR-binding delivery domain fused to the lysosomal alpha-glucosidase; and (b) a nuclease agent or one or more nucleic acids encoding the nuclease agent, wherein the nuclease agent targets a nuclease target site in a target gene at the target genomic locus, wherein the nuclease agent cleaves the nuclease target site, the nucleic acid construct is inserted into the target genomic locus to create a modified target genomic locus, and the multidomain therapeutic protein comprising the TfR-binding delivery domain fused to the lysosomal alpha-glucosidase is expressed from the modified target genomic locus. In some such methods, the expressed multidomain therapeutic protein is delivered to and internalized by skeletal muscle heart, and central nervous system tissue in the subject. In some such methods, the neonatal cell is a liver cell or the population of neonatal cells is a population of liver cells. In some such methods, the neonatal cell is a hepatocyte or the population of neonatal cells is a population of hepatocytes. In some such methods, the neonatal cell is a human cell or the population of neonatal cells is a population of human cells.

[0064] In another aspect, provided are methods of treating a lysosomal alpha-glucosidase deficiency in a neonatal subject in need thereof. Some such methods comprise administering to the neonatal subject: (a) a nucleic acid construct comprising a coding sequence for a multidomain therapeutic protein comprising a TfR-binding delivery domain fused to a lysosomal alpha-glucosidase; and (b) a nuclease agent or one or more nucleic acids encoding the nuclease agent, wherein the nuclease agent targets a nuclease target site in a target genomic locus, wherein the nuclease agent cleaves the nuclease target site, the nucleic acid construct is inserted into the target genomic locus to create a modified target genomic locus, and the multidomain therapeutic protein comprising the TfR-binding delivery domain fused to the lysosomal alpha-glucosidase is expressed from the modified target genomic locus. In another aspect, provided are methods of reducing glycogen accumulation in a tissue in a neonatal subject in need thereof. Some such methods comprise administering to the neonatal subject: (a) a nucleic acid construct comprising a coding sequence for a multidomain therapeutic protein comprising a TfR-binding delivery domain fused to a lysosomal alpha-glucosidase; and (b) a nuclease agent or one or more nucleic acids encoding the nuclease agent, wherein the nuclease agent targets a nuclease target site in a target genomic locus, wherein the nuclease agent cleaves the nuclease target site, the nucleic acid construct is inserted into the target genomic locus to create a modified target genomic locus, and the multidomain therapeutic protein comprising the TfR-binding delivery domain fused to the lysosomal alpha-glucosidase is expressed from the modified target genomic locus and reduces glycogen accumulation in the tissue. In some such methods, the subject has Pompe disease. In another aspect, provided are methods of treating Pompe disease in a neonatal subject in need thereof. Some such methods comprise administering to the neonatal subject: (a) a nucleic acid construct comprising a coding sequence for a multidomain therapeutic protein comprising a TfR-binding delivery domain fused to a lysosomal alpha-glucosidase; and (b) a nuclease agent or one or more nucleic acids encoding the nuclease agent, wherein the nuclease agent targets a nuclease target site in a target genomic locus, wherein the nuclease agent cleaves the nuclease target site, the nucleic acid construct is inserted into the target genomic locus to create a modified target genomic locus, and the multidomain therapeutic protein comprising the TfR-binding delivery domain fused to the lysosomal alpha-glucosidase is expressed from the modified target genomic locus, thereby treating the Pompe disease. In some such methods, the Pompe disease is infantile-onset Pompe disease.

[0065] In some such methods, the method results in a therapeutically effective level of circulating multidomain therapeutic protein or lysosomal alpha-glucosidase in the subject. In some such methods, the method reduces glycogen accumulation in skeletal muscle, heart, or central nervous system tissue in the subject. In some such methods, the method reduces glycogen accumulation in skeletal muscle, heart, and central nervous system tissue in the subject. In some such methods, the method results in reduced glycogen levels in skeletal muscle, heart, and/or central nervous system tissue in the subject comparable to wild type levels at the same age. In some such methods, the method improves muscle strength in the subject or prevents loss of muscle strength in the subject compared to a control subject. In some such methods, the method results in the subject having muscle strength comparable to wild type levels at the same age.

[0066] In another aspect, provided are methods of preventing or reducing the onset of a sign or symptom of Pompe disease in a neonatal subject in need thereof. Some such methods comprise administering to the neonatal subject: (a) a nucleic acid construct comprising a coding sequence for a multidomain therapeutic protein comprising a TfR-binding delivery domain fused to a lysosomal alpha-glucosidase; and (b) a nuclease agent or one or more nucleic acids encoding the nuclease agent, wherein the nuclease agent targets a nuclease target site in a target genomic locus, wherein the nuclease agent cleaves the nuclease target site, the nucleic acid construct is inserted into the target genomic locus to create a modified target genomic locus, and the multidomain therapeutic protein comprising the TfR-binding delivery domain fused to the lysosomal alpha-glucosidase is expressed from the modified target genomic locus, thereby preventing or reducing the onset of a sign or symptom of the Pompe disease in the subject. In some such methods, the Pompe disease is infantile-onset Pompe disease. In some such methods, the Pompe disease is late-onset Pompe disease. In some such methods, the method results in a therapeutically effective level of circulating multidomain therapeutic protein or lysosomal alpha-glucosidase in the subject. In some such methods, the method prevents or reduces glycogen accumulation in skeletal muscle, heart, or central nervous system tissue in the subject. In some such methods, the method prevents or reduces glycogen accumulation in skeletal muscle, heart, and central nervous system tissue in the subject. In some such methods, the neonatal subject is a human subject within 24 weeks after birth. In some such methods, the neonatal subject is a human subject within 12 weeks after birth. In some such methods, the neonatal subject is a human subject within 8 weeks after birth. In some such methods, the neonatal subject is a human subject within 4 weeks after birth.

[0067] In some such methods, the method results in increased expression of the multidomain therapeutic protein in the subject compared to a method comprising administering an episomal expression vector encoding the multidomain therapeutic protein to a control subject. In some such methods, the method results in increased serum levels of the multidomain therapeutic protein in the subject compared to a method comprising administering an episomal expression vector encoding the multidomain therapeutic protein to a control subject. In some such methods, the method results in serum levels of the multidomain therapeutic protein in the subject of at least about 1 µg/mL, at least about 2 µg/mL, at least about 3 µg/mL, at least about 4 µg/mL, at least about 5 µg/mL, at least about 6 µg/mL, at least about 7 µg/mL, at least about 8 µg/mL, at least about 9 µg/mL, or at least about 10 µg/mL. In some such methods, the method results in serum levels of the multidomain therapeutic protein in the subject of at least about 2 µg/mL or at least about 5 µg/mL. In some such methods, the method results in serum levels of the multidomain therapeutic protein in the subject of between about 2 µg/mL and about 30 µg/mL or between about 2 µg/mL and about 20 µg/mL. In some such methods, the method results in serum levels of the multidomain therapeutic protein in the subject of between about 5 µg/mL and about 30 µg/mL or between about 5 µg/mL and about 20 µg/mL. In some such methods, the method achieves lysosomal alpha-glucosidase activity levels of at least about 40% of normal, at least about 45% of normal, at least about 50%, at least about 60%, at least about 70%, at least about 80%, at least about 90%, or 100% of normal. In some such methods, the subject has infantile-onset Pompe disease, and the method achieves lysosomal alpha-glucosidase expression or activity levels of at least about 1% or more than about 1% of normal. In some such methods, the subject has late-onset Pompe disease, and the method achieves lysosomal alpha-glucosidase expression or activity levels of at least about 40% of normal or more than about 40% of normal. In some such methods, the method increases lysosomal alpha-glucosidase activity over the subject’s baseline lysosomal alpha-glucosidase activity by at least about 1%, at least about 5%, at least about 10%, at least about 15%, at least about 20%, at least about 25%, at least about 30%, at least about 35%, at least about 40%, at least about 45%, at least about 50%, at least about 60%, at least about 70%, at least about 80%, at least about 90%, or at least about 100%. In some such methods, the expression or activity of the multidomain therapeutic protein is at least 50% of the expression or activity of the multidomain therapeutic protein at a peak level of expression measured for the subject at six months or 24 weeks after the administering. In some such methods, the expression or activity of the multidomain therapeutic protein is at least 50% of the expression or activity of the multidomain therapeutic protein at a peak level of expression measured for the subject at one year after the administering. In some such methods, the expression or activity of the multidomain therapeutic protein is at least 60% of the expression or activity of the multidomain therapeutic protein at a peak level of expression measured for the subject at six months or 24 weeks after the administering. In some such methods, the expression or activity of the multidomain therapeutic protein is at least 50% of the expression or activity of the multidomain therapeutic protein at a peak level of expression measured for the subject at two years after the administering. In some such methods, the expression or activity of the multidomain therapeutic protein is at least 60% of the expression or activity of the multidomain therapeutic protein at a peak level of expression measured for the subject at two years after the administering. In some such methods, the expression or activity of the multidomain therapeutic protein is at least 60% of the expression or activity of the multidomain therapeutic protein at a peak level of expression measured for the subject at six months or 24 weeks after the administering.

[0068] In some such methods, the method further comprises assessing preexisting AAV immunity in the neonatal subject prior to administering the nucleic acid construct to the subject. In some such methods, the preexisting AAV immunity is preexisting AAV8 immunity. In some such methods, assessing preexisting AAV immunity comprises assessing immunogenicity using a total antibody immune assay or a neutralizing antibody assay.

[0069] In some such methods, the nucleic acid construct is administered simultaneously with the nuclease agent or the one or more nucleic acids encoding the nuclease agent. In some such methods, the nucleic acid construct is not administered simultaneously with the nuclease agent or the one or more nucleic acids encoding the nuclease agent. In some such methods, the nucleic acid construct is administered prior to the nuclease agent or the one or more nucleic acids encoding the nuclease agent. In some such methods, the nucleic acid construct is administered after the nuclease agent or the one or more nucleic acids encoding the nuclease agent.

[0070] In some such methods, the TfR-binding delivery domain is fused to the lysosomal alpha-glucosidase protein via a peptide linker. In some such methods, the coding sequence for the TfR-binding delivery domain is codon-optimized or CpG-depleted. In some such methods, the coding sequence for the TfR-binding delivery domain is codon-optimized and CpG-depleted. In some such methods, the TfR-binding delivery domain comprises an anti-TfR antigen-binding protein. In some such methods, the anti-TfR antigen binding protein comprises: (i) a HCVR that comprises the HCDR1, HCDR2 and HCDR3 of a HCVR comprising the amino acid sequence set forth in SEQ ID NO: 217, 227, 237, 247, 257, 267, 277, 287, 297, 307, 317, 327, 337, 347, 357, 367, 377, 387, 397, 407, 417, 427, 437, 447, 457, 467, 477, 487, 497, 507, 517, or 527 (or a variant thereof); and/or (ii) a LCVR that comprises the LCDR1, LCDR2 and LCDR3 of a LCVR comprising the amino acid sequence set forth in SEQ ID NO: 222, 232, 242, 252, 262, 272, 282, 292, 302, 312, 322, 332, 342, 352, 362, 372, 382, 392, 402, 412, 422, 432, 442, 452, 462, 472, 482, 492, 502, 512, 522, or 532 (or a variant thereof). In some such methods, the anti-TfR antigen binding protein comprises: (1) a HCVR comprising the HCDR1, HCDR2 and HCDR3 of a HCVR that comprises the amino acid sequence set forth in SEQ ID NO: 217 (or a variant thereof); and a LCVR comprising the LCDR1, LCDR2 and LCDR3 of a LCVR that comprises the amino acid sequence set forth in SEQ ID NO: 222 (or a variant thereof); (2) a HCVR comprising the HCDR1, HCDR2 and HCDR3 of a HCVR that comprises the amino acid sequence set forth in SEQ ID NO: 227 (or a variant thereof); and a LCVR comprising the LCDR1, LCDR2 and LCDR3 of a LCVR that comprises the amino acid sequence set forth in SEQ ID NO: 232 (or a variant thereof); (3) a HCVR comprising the HCDR1, HCDR2 and HCDR3 of a HCVR that comprises the amino acid sequence set forth in SEQ ID NO: 237 (or a variant thereof); and a LCVR comprising the LCDR1, LCDR2 and LCDR3 of a LCVR that comprises the amino acid sequence set forth in SEQ ID NO: 242 (or a variant thereof); (4) a HCVR comprising the HCDR1, HCDR2 and HCDR3 of a HCVR that comprises the amino acid sequence set forth in SEQ ID NO: 247 (or a variant thereof); and a LCVR comprising the LCDR1, LCDR2 and LCDR3 of a LCVR that comprises the amino acid sequence set forth in SEQ ID NO: 252 (or a variant thereof); (5) a HCVR comprising the HCDR1, HCDR2 and HCDR3 of a HCVR that comprises the amino acid sequence set forth in SEQ ID NO: 257 (or a variant thereof); and a LCVR comprising the LCDR1, LCDR2 and LCDR3 of a LCVR that comprises the amino acid sequence set forth in SEQ ID NO: 262 (or a variant thereof); (6) a HCVR comprising the HCDR1, HCDR2 and HCDR3 of a HCVR that comprises the amino acid sequence set forth in SEQ ID NO: 267 (or a variant thereof); and a LCVR comprising the LCDR1, LCDR2 and LCDR3 of a LCVR that comprises the amino acid sequence set forth in SEQ ID NO: 272 (or a variant thereof); (7) a HCVR comprising the HCDR1, HCDR2 and HCDR3 of a HCVR that comprises the amino acid sequence set forth in SEQ ID NO: 277 (or a variant thereof); and a LCVR comprising the LCDR1, LCDR2 and LCDR3 of a LCVR that comprises the amino acid sequence set forth in SEQ ID NO: 282 (or a variant thereof); (8) a HCVR comprising the HCDR1, HCDR2 and HCDR3 of a HCVR that comprises the amino acid sequence set forth in SEQ ID NO: 287 (or a variant thereof); and a LCVR comprising the LCDR1, LCDR2 and LCDR3 of a LCVR that comprises the amino acid sequence set forth in SEQ ID NO: 292 (or a variant thereof); (9) a HCVR comprising the HCDR1, HCDR2 and HCDR3 of a HCVR that comprises the amino acid sequence set forth in SEQ ID NO: 297 (or a variant thereof); and a LCVR comprising the LCDR1, LCDR2 and LCDR3 of a LCVR that comprises the amino acid sequence set forth in SEQ ID NO: 302 (or a variant thereof); (10) a HCVR comprising the HCDR1, HCDR2 and HCDR3 of a HCVR that comprises the amino acid sequence set forth in SEQ ID NO: 307 (or a variant thereof); and a LCVR comprising the LCDR1, LCDR2 and LCDR3 of a LCVR that comprises the amino acid sequence set forth in SEQ ID NO: 312 (or a variant thereof); (11) a HCVR comprising the HCDR1, HCDR2 and HCDR3 of a HCVR that comprises the amino acid sequence set forth in SEQ ID NO: 317 (or a variant thereof); and a LCVR comprising the LCDR1, LCDR2 and LCDR3 of a LCVR that comprises the amino acid sequence set forth in SEQ ID NO: 322 (or a variant thereof); (12) a HCVR comprising the HCDR1, HCDR2 and HCDR3 of a HCVR that comprises the amino acid sequence set forth in SEQ ID NO: 327 (or a variant thereof); and a LCVR comprising the LCDR1, LCDR2 and LCDR3 of a LCVR that comprises the amino acid sequence set forth in SEQ ID NO: 332 (or a variant thereof); (13) a HCVR comprising the HCDR1, HCDR2 and HCDR3 of a HCVR that comprises the amino acid sequence set forth in SEQ ID NO: 337 (or a variant thereof); and a LCVR comprising the LCDR1, LCDR2 and LCDR3 of a LCVR that comprises the amino acid sequence set forth in SEQ ID NO: 342 (or a variant thereof); (14) a HCVR comprising the HCDR1, HCDR2 and HCDR3 of a HCVR that comprises the amino acid sequence set forth in SEQ ID NO: 347 (or a variant thereof); and a LCVR comprising the LCDR1, LCDR2 and LCDR3 of a LCVR that comprises the amino acid sequence set forth in SEQ ID NO: 352 (or a variant thereof); (15) a HCVR comprising the HCDR1, HCDR2 and HCDR3 of a HCVR that comprises the amino acid sequence set forth in SEQ ID NO: 357 (or a variant thereof); and a LCVR comprising the LCDR1, LCDR2 and LCDR3 of a LCVR that comprises the amino acid sequence set forth in SEQ ID NO: 362 (or a variant thereof); (16) a HCVR comprising the HCDR1, HCDR2 and HCDR3 of a HCVR that comprises the amino acid sequence set forth in SEQ ID NO: 367 (or a variant thereof); and a LCVR comprising the LCDR1, LCDR2 and LCDR3 of a LCVR that comprises the amino acid sequence set forth in SEQ ID NO: 372 (or a variant thereof); (17) a HCVR comprising the HCDR1, HCDR2 and HCDR3 of a HCVR that comprises the amino acid sequence set forth in SEQ ID NO: 377 (or a variant thereof); and a LCVR comprising the LCDR1, LCDR2 and LCDR3 of a LCVR that comprises the amino acid sequence set forth in SEQ ID NO: 382 (or a variant thereof); (18) a HCVR comprising the HCDR1, HCDR2 and HCDR3 of a HCVR that comprises the amino acid sequence set forth in SEQ ID NO: 387 (or a variant thereof); and a LCVR comprising the LCDR1, LCDR2 and LCDR3 of a LCVR that comprises the amino acid sequence set forth in SEQ ID NO: 392 (or a variant thereof); (19) a HCVR comprising the HCDR1, HCDR2 and HCDR3 of a HCVR that comprises the amino acid sequence set forth in SEQ ID NO: 397 (or a variant thereof); and a LCVR comprising the LCDR1, LCDR2 and LCDR3 of a LCVR that comprises the amino acid sequence set forth in SEQ ID NO: 402 (or a variant thereof); (20) a HCVR comprising the HCDR1, HCDR2 and HCDR3 of a HCVR that comprises the amino acid sequence set forth in SEQ ID NO: 407 (or a variant thereof); and a LCVR comprising the LCDR1, LCDR2 and LCDR3 of a LCVR that comprises the amino acid sequence set forth in SEQ ID NO: 412 (or a variant thereof); (21) a HCVR comprising the HCDR1, HCDR2 and HCDR3 of a HCVR that comprises the amino acid sequence set forth in SEQ ID NO: 417 (or a variant thereof); and a LCVR comprising the LCDR1, LCDR2 and LCDR3 of a LCVR that comprises the amino acid sequence set forth in SEQ ID NO: 422 (or a variant thereof); (22) a HCVR comprising the HCDR1, HCDR2 and HCDR3 of a HCVR that comprises the amino acid sequence set forth in SEQ ID NO: 427 (or a variant thereof); and a LCVR comprising the LCDR1, LCDR2 and LCDR3 of a LCVR that comprises the amino acid sequence set forth in SEQ ID NO: 432 (or a variant thereof); (23) a HCVR comprising the HCDR1, HCDR2 and HCDR3 of a HCVR that comprises the amino acid sequence set forth in SEQ ID NO: 437 (or a variant thereof); and a LCVR comprising the LCDR1, LCDR2 and LCDR3 of a LCVR that comprises the amino acid sequence set forth in SEQ ID NO: 442 (or a variant thereof); (24) a HCVR comprising the HCDR1, HCDR2 and HCDR3 of a HCVR that comprises the amino acid sequence set forth in SEQ ID NO: 447 (or a variant thereof); and a LCVR comprising the LCDR1, LCDR2 and LCDR3 of a LCVR that comprises the amino acid sequence set forth in SEQ ID NO: 452 (or a variant thereof); (25) a HCVR comprising the HCDR1, HCDR2 and HCDR3 of a HCVR that comprises the amino acid sequence set forth in SEQ ID NO: 457 (or a variant thereof); and a LCVR comprising the LCDR1, LCDR2 and LCDR3 of a LCVR that comprises the amino acid sequence set forth in SEQ ID NO: 462 (or a variant thereof); (26) a HCVR comprising the HCDR1, HCDR2 and HCDR3 of a HCVR that comprises the amino acid sequence set forth in SEQ ID NO: 467 (or a variant thereof); and a LCVR comprising the LCDR1, LCDR2 and LCDR3 of a LCVR that comprises the amino acid sequence set forth in SEQ ID NO: 472 (or a variant thereof); (27) a HCVR comprising the HCDR1, HCDR2 and HCDR3 of a HCVR that comprises the amino acid sequence set forth in SEQ ID NO: 477 (or a variant thereof); and a LCVR comprising the LCDR1, LCDR2 and LCDR3 of a LCVR that comprises the amino acid sequence set forth in SEQ ID NO: 482 (or a variant thereof); (28) a HCVR comprising the HCDR1, HCDR2 and HCDR3 of a HCVR that comprises the amino acid sequence set forth in SEQ ID NO: 487 (or a variant thereof); and a LCVR comprising the LCDR1, LCDR2 and LCDR3 of a LCVR that comprises the amino acid sequence set forth in SEQ ID NO: 492 (or a variant thereof); (29) a HCVR comprising the HCDR1, HCDR2 and HCDR3 of a HCVR that comprises the amino acid sequence set forth in SEQ ID NO: 497 (or a variant thereof); and a LCVR comprising the LCDR1, LCDR2 and LCDR3 of a LCVR that comprises the amino acid sequence set forth in SEQ ID NO: 502 (or a variant thereof); (30) a HCVR comprising the HCDR1, HCDR2 and HCDR3 of a HCVR that comprises the amino acid sequence set forth in SEQ ID NO: 507 (or a variant thereof); and a LCVR comprising the LCDR1, LCDR2 and LCDR3 of a LCVR that comprises the amino acid sequence set forth in SEQ ID NO: 512 (or a variant thereof); (31) a HCVR comprising the HCDR1, HCDR2 and HCDR3 of a HCVR that comprises the amino acid sequence set forth in SEQ ID NO: 517 (or a variant thereof); and a LCVR comprising the LCDR1, LCDR2 and LCDR3 of a LCVR that comprises the amino acid sequence set forth in SEQ ID NO: 522 (or a variant thereof); or (32) a HCVR comprising the HCDR1, HCDR2 and HCDR3 of a HCVR that comprises the amino acid sequence set forth in SEQ ID NO: 527 (or a variant thereof); and a LCVR comprising the LCDR1, LCDR2 and LCDR3 of a LCVR that comprises the amino acid sequence set forth in SEQ ID NO: 532 (or a variant thereof). In some such methods, the anti-TfR antigen binding protein comprises: (1) a HCVR comprising the HCDR1, HCDR2 and HCDR3 of a HCVR that comprises the amino acid sequence set forth in SEQ ID NO: 437 (or a variant thereof); and a LCVR comprising the LCDR1, LCDR2 and LCDR3 of a LCVR that comprises the amino acid sequence set forth in SEQ ID NO: 442 (or a variant thereof); or (2) a HCVR comprising the HCDR1, HCDR2 and HCDR3 of a HCVR that comprises the amino acid sequence set forth in SEQ ID NO: 457 (or a variant thereof); and a LCVR comprising the LCDR1, LCDR2 and LCDR3 of a LCVR that comprises the amino acid sequence set forth in SEQ ID NO: 462 (or a variant thereof). In some such methods, the anti-TfR antigen binding protein comprises: (a) a HCVR that comprises: an HCDR1 comprising the amino acid sequence set forth in SEQ ID NO: 218 (or a variant thereof), an HCDR2 comprising the amino acid sequence set forth in SEQ ID NO: 219 (or a variant thereof), and an HCDR3 comprising the amino acid sequence set forth in SEQ ID NO: 220 (or a variant thereof); and a LCVR that comprises: an LCDR1 comprising the amino acid sequence set forth in SEQ ID NO: 223 (or a variant thereof), an LCDR2 comprising the amino acid sequence set forth in SEQ ID NO: 224 (or a variant thereof), and an LCDR3 comprising the amino acid sequence set forth in SEQ ID NO: 225 (or a variant thereof); (b) a HCVR that comprises: an HCDR1 comprising the amino acid sequence set forth in SEQ ID NO: 228 (or a variant thereof), an HCDR2 comprising the amino acid sequence set forth in SEQ ID NO: 229 (or a variant thereof), and an HCDR3 comprising the amino acid sequence set forth in SEQ ID NO: 230 (or a variant thereof); and a LCVR that comprises: an LCDR1 comprising the amino acid sequence set forth in SEQ ID NO: 233 (or a variant thereof), an LCDR2 comprising the amino acid sequence set forth in SEQ ID NO: 234 (or a variant thereof), and an LCDR3 comprising the amino acid sequence set forth in SEQ ID NO: 235 (or a variant thereof); (c) a HCVR that comprises: an HCDR1 comprising the amino acid sequence set forth in SEQ ID NO: 238 (or a variant thereof), an HCDR2 comprising the amino acid sequence set forth in SEQ ID NO: 239 (or a variant thereof), and an HCDR3 comprising the amino acid sequence set forth in SEQ ID NO: 240 (or a variant thereof); and a LCVR that comprises: an LCDR1 comprising the amino acid sequence set forth in SEQ ID NO: 243 (or a variant thereof), an LCDR2 comprising the amino acid sequence set forth in SEQ ID NO: 244 (or a variant thereof), and an LCDR3 comprising the amino acid sequence set forth in SEQ ID NO: 245 (or a variant thereof); (d) a HCVR that comprises: an HCDR1 comprising the amino acid sequence set forth in SEQ ID NO: 248 (or a variant thereof), an HCDR2 comprising the amino acid sequence set forth in SEQ ID NO: 249 (or a variant thereof), and an HCDR3 comprising the amino acid sequence set forth in SEQ ID NO: 250 (or a variant thereof); and a LCVR that comprises: an LCDR1 comprising the amino acid sequence set forth in SEQ ID NO: 253 (or a variant thereof), an LCDR2 comprising the amino acid sequence set forth in SEQ ID NO: 254 (or a variant thereof), and an LCDR3 comprising the amino acid sequence set forth in SEQ ID NO: 255 (or a variant thereof); (e) a HCVR that comprises: an HCDR1 comprising the amino acid sequence set forth in SEQ ID NO: 258 (or a variant thereof), an HCDR2 comprising the amino acid sequence set forth in SEQ ID NO: 259 (or a variant thereof), and an HCDR3 comprising the amino acid sequence set forth in SEQ ID NO: 260 (or a variant thereof); and a LCVR that comprises: an LCDR1 comprising the amino acid sequence set forth in SEQ ID NO: 263 (or a variant thereof), an LCDR2 comprising the amino acid sequence set forth in SEQ ID NO: 264 (or a variant thereof), and an LCDR3 comprising the amino acid sequence set forth in SEQ ID NO: 265 (or a variant thereof); (f) a HCVR that comprises: an HCDR1 comprising the amino acid sequence set forth in SEQ ID NO: 268 (or a variant thereof), an HCDR2 comprising the amino acid sequence set forth in SEQ ID NO: 269 (or a variant thereof), and an HCDR3 comprising the amino acid sequence set forth in SEQ ID NO: 270 (or a variant thereof); and a LCVR that comprises: an LCDR1 comprising the amino acid sequence set forth in SEQ ID NO: 273 (or a variant thereof), an LCDR2 comprising the amino acid sequence set forth in SEQ ID NO: 274 (or a variant thereof), and an LCDR3 comprising the amino acid sequence set forth in SEQ ID NO: 275 (or a variant thereof); (g) a HCVR that comprises: an HCDR1 comprising the amino acid sequence set forth in SEQ ID NO: 278 (or a variant thereof), an HCDR2 comprising the amino acid sequence set forth in SEQ ID NO: 279 (or a variant thereof), and an HCDR3 comprising the amino acid sequence set forth in SEQ ID NO: 280 (or a variant thereof); and a LCVR that comprises: an LCDR1 comprising the amino acid sequence set forth in SEQ ID NO: 283 (or a variant thereof), an LCDR2 comprising the amino acid sequence set forth in SEQ ID NO: 284 (or a variant thereof), and an LCDR3 comprising the amino acid sequence set forth in SEQ ID NO: 285 (or a variant thereof); (h) a HCVR that comprises: an HCDR1 comprising the amino acid sequence set forth in SEQ ID NO: 288 (or a variant thereof), an HCDR2 comprising the amino acid sequence set forth in SEQ ID NO: 289 (or a variant thereof), and an HCDR3 comprising the amino acid sequence set forth in SEQ ID NO: 290 (or a variant thereof); and a LCVR that comprises: an LCDR1 comprising the amino acid sequence set forth in SEQ ID NO: 293 (or a variant thereof), an LCDR2 comprising the amino acid sequence set forth in SEQ ID NO: 294 (or a variant thereof), and an LCDR3 comprising the amino acid sequence set forth in SEQ ID NO: 295 (or a variant thereof); (i) a HCVR that comprises: an HCDR1 comprising the amino acid sequence set forth in SEQ ID NO: 298 (or a variant thereof), an HCDR2 comprising the amino acid sequence set forth in SEQ ID NO: 299 (or a variant thereof), and an HCDR3 comprising the amino acid sequence set forth in SEQ ID NO: 300 (or a variant thereof); and a LCVR that comprises: an LCDR1 comprising the amino acid sequence set forth in SEQ ID NO: 303 (or a variant thereof), an LCDR2 comprising the amino acid sequence set forth in SEQ ID NO: 304 (or a variant thereof), and an LCDR3 comprising the amino acid sequence set forth in SEQ ID NO: 305 (or a variant thereof); (j) a HCVR that comprises: an HCDR1 comprising the amino acid sequence set forth in SEQ ID NO: 308 (or a variant thereof), an HCDR2 comprising the amino acid sequence set forth in SEQ ID NO: 309 (or a variant thereof), and an HCDR3 comprising the amino acid sequence set forth in SEQ ID NO: 310 (or a variant thereof); and a LCVR that comprises: an LCDR1 comprising the amino acid sequence set forth in SEQ ID NO: 313 (or a variant thereof), an LCDR2 comprising the amino acid sequence set forth in SEQ ID NO: 314 (or a variant thereof), and an LCDR3 comprising the amino acid sequence set forth in SEQ ID NO: 315 (or a variant thereof); (k) a HCVR that comprises: an HCDR1 comprising the amino acid sequence set forth in SEQ ID NO: 318 (or a variant thereof), an HCDR2 comprising the amino acid sequence set forth in SEQ ID NO: 319 (or a variant thereof), and an HCDR3 comprising the amino acid sequence set forth in SEQ ID NO: 320 (or a variant thereof); and a LCVR that comprises: an LCDR1 comprising the amino acid sequence set forth in SEQ ID NO: 323 (or a variant thereof), an LCDR2 comprising the amino acid sequence set forth in SEQ ID NO: 324 (or a variant thereof), and an LCDR3 comprising the amino acid sequence set forth in SEQ ID NO: 325 (or a variant thereof); (1) a HCVR that comprises: an HCDR1 comprising the amino acid sequence set forth in SEQ ID NO: 328 (or a variant thereof), an HCDR2 comprising the amino acid sequence set forth in SEQ ID NO: 329 (or a variant thereof), and an HCDR3 comprising the amino acid sequence set forth in SEQ ID NO: 330 (or a variant thereof); and a LCVR that comprises: an LCDR1 comprising the amino acid sequence set forth in SEQ ID NO: 333 (or a variant thereof), an LCDR2 comprising the amino acid sequence set forth in SEQ ID NO: 334 (or a variant thereof), and an LCDR3 comprising the amino acid sequence set forth in SEQ ID NO: 335 (or a variant thereof); (m) a HCVR that comprises: an HCDR1 comprising the amino acid sequence set forth in SEQ ID NO: 338 (or a variant thereof), an HCDR2 comprising the amino acid sequence set forth in SEQ ID NO: 339 (or a variant thereof), and an HCDR3 comprising the amino acid sequence set forth in SEQ ID NO: 340 (or a variant thereof); and a LCVR that comprises: an LCDR1 comprising the amino acid sequence set forth in SEQ ID NO: 343 (or a variant thereof), an LCDR2 comprising the amino acid sequence set forth in SEQ ID NO: 344 (or a variant thereof), and an LCDR3 comprising the amino acid sequence set forth in SEQ ID NO: 345 (or a variant thereof); (n) a HCVR that comprises: an HCDR1 comprising the amino acid sequence set forth in SEQ ID NO: 348 (or a variant thereof), an HCDR2 comprising the amino acid sequence set forth in SEQ ID NO: 349 (or a variant thereof), and an HCDR3 comprising the amino acid sequence set forth in SEQ ID NO: 350 (or a variant thereof); and a LCVR that comprises: an LCDR1 comprising the amino acid sequence set forth in SEQ ID NO: 353 (or a variant thereof), an LCDR2 comprising the amino acid sequence set forth in SEQ ID NO: 354 (or a variant thereof), and an LCDR3 comprising the amino acid sequence set forth in SEQ ID NO: 355 (or a variant thereof); (o) a HCVR that comprises: an HCDR1 comprising the amino acid sequence set forth in SEQ ID NO: 358 (or a variant thereof), an HCDR2 comprising the amino acid sequence set forth in SEQ ID NO: 359 (or a variant thereof), and an HCDR3 comprising the amino acid sequence set forth in SEQ ID NO: 360 (or a variant thereof); and a LCVR that comprises: an LCDR1 comprising the amino acid sequence set forth in SEQ ID NO: 363 (or a variant thereof), an LCDR2 comprising the amino acid sequence set forth in SEQ ID NO: 364 (or a variant thereof), and an LCDR3 comprising the amino acid sequence set forth in SEQ ID NO: 365 (or a variant thereof); (p) a HCVR that comprises: an HCDR1 comprising the amino acid sequence set forth in SEQ ID NO: 368 (or a variant thereof), an HCDR2 comprising the amino acid sequence set forth in SEQ ID NO: 369 (or a variant thereof), and an HCDR3 comprising the amino acid sequence set forth in SEQ ID NO: 370 (or a variant thereof); and a LCVR that comprises: an LCDR1 comprising the amino acid sequence set forth in SEQ ID NO: 373 (or a variant thereof), an LCDR2 comprising the amino acid sequence set forth in SEQ ID NO: 374 (or a variant thereof), and an LCDR3 comprising the amino acid sequence set forth in SEQ ID NO: 375 (or a variant thereof); (q) a HCVR that comprises: an HCDR1 comprising the amino acid sequence set forth in SEQ ID NO: 378 (or a variant thereof), an HCDR2 comprising the amino acid sequence set forth in SEQ ID NO: 379 (or a variant thereof), and an HCDR3 comprising the amino acid sequence set forth in SEQ ID NO: 380 (or a variant thereof); and a LCVR that comprises: an LCDR1 comprising the amino acid sequence set forth in SEQ ID NO: 383 (or a variant thereof), an LCDR2 comprising the amino acid sequence set forth in SEQ ID NO: 384 (or a variant thereof), and an LCDR3 comprising the amino acid sequence set forth in SEQ ID NO: 385 (or a variant thereof); (r) a HCVR that comprises: an HCDR1 comprising the amino acid sequence set forth in SEQ ID NO: 388 (or a variant thereof), an HCDR2 comprising the amino acid sequence set forth in SEQ ID NO: 389 (or a variant thereof), and an HCDR3 comprising the amino acid sequence set forth in SEQ ID NO: 390 (or a variant thereof); and a LCVR that comprises: an LCDR1 comprising the amino acid sequence set forth in SEQ ID NO: 393 (or a variant thereof), an LCDR2 comprising the amino acid sequence set forth in SEQ ID NO: 394 (or a variant thereof), and an LCDR3 comprising the amino acid sequence set forth in SEQ ID NO: 395 (or a variant thereof); (s) a HCVR that comprises: an HCDR1 comprising the amino acid sequence set forth in SEQ ID NO: 398 (or a variant thereof), an HCDR2 comprising the amino acid sequence set forth in SEQ ID NO: 399 (or a variant thereof), and an HCDR3 comprising the amino acid sequence set forth in SEQ ID NO: 400 (or a variant thereof); and a LCVR that comprises: an LCDR1 comprising the amino acid sequence set forth in SEQ ID NO: 403 (or a variant thereof), an LCDR2 comprising the amino acid sequence set forth in SEQ ID NO: 404 (or a variant thereof), and an LCDR3 comprising the amino acid sequence set forth in SEQ ID NO: 405 (or a variant thereof); (t) a HCVR that comprises: an HCDR1 comprising the amino acid sequence set forth in SEQ ID NO: 408 (or a variant thereof), an HCDR2 comprising the amino acid sequence set forth in SEQ ID NO: 409 (or a variant thereof), and an HCDR3 comprising the amino acid sequence set forth in SEQ ID NO: 410 (or a variant thereof); and a LCVR that comprises: an LCDR1 comprising the amino acid sequence set forth in SEQ ID NO: 413 (or a variant thereof), an LCDR2 comprising the amino acid sequence set forth in SEQ ID NO: 414 (or a variant thereof), and an LCDR3 comprising the amino acid sequence set forth in SEQ ID NO: 415 (or a variant thereof); (u) a HCVR that comprises: an HCDR1 comprising the amino acid sequence set forth in SEQ ID NO: 418 (or a variant thereof), an HCDR2 comprising the amino acid sequence set forth in SEQ ID NO: 419 (or a variant thereof), and an HCDR3 comprising the amino acid sequence set forth in SEQ ID NO: 420 (or a variant thereof); and a LCVR that comprises: an LCDR1 comprising the amino acid sequence set forth in SEQ ID NO: 423 (or a variant thereof), an LCDR2 comprising the amino acid sequence set forth in SEQ ID NO: 424 (or a variant thereof), and an LCDR3 comprising the amino acid sequence set forth in SEQ ID NO: 425 (or a variant thereof); (v) a HCVR that comprises: an HCDR1 comprising the amino acid sequence set forth in SEQ ID NO: 428 (or a variant thereof), an HCDR2 comprising the amino acid sequence set forth in SEQ ID NO: 429 (or a variant thereof), and an HCDR3 comprising the amino acid sequence set forth in SEQ ID NO: 430 (or a variant thereof); and a LCVR that comprises: an LCDR1 comprising the amino acid sequence set forth in SEQ ID NO: 433 (or a variant thereof), an LCDR2 comprising the amino acid sequence set forth in SEQ ID NO: 434 (or a variant thereof), and an LCDR3 comprising the amino acid sequence set forth in SEQ ID NO: 435 (or a variant thereof); (w) a HCVR that comprises: an HCDR1 comprising the amino acid sequence set forth in SEQ ID NO: 438 (or a variant thereof), an HCDR2 comprising the amino acid sequence set forth in SEQ ID NO: 439 (or a variant thereof), and an HCDR3 comprising the amino acid sequence set forth in SEQ ID NO: 440 (or a variant thereof); and a LCVR that comprises: an LCDR1 comprising the amino acid sequence set forth in SEQ ID NO: 443 (or a variant thereof), an LCDR2 comprising the amino acid sequence set forth in SEQ ID NO: 444 (or a variant thereof), and an LCDR3 comprising the amino acid sequence set forth in SEQ ID NO: 445 (or a variant thereof); (x) a HCVR that comprises: an HCDR1 comprising the amino acid sequence set forth in SEQ ID NO: 448 (or a variant thereof), an HCDR2 comprising the amino acid sequence set forth in SEQ ID NO: 449 (or a variant thereof), and an HCDR3 comprising the amino acid sequence set forth in SEQ ID NO: 450 (or a variant thereof); and a LCVR that comprises: an LCDR1 comprising the amino acid sequence set forth in SEQ ID NO: 453 (or a variant thereof), an LCDR2 comprising the amino acid sequence set forth in SEQ ID NO: 454 (or a variant thereof), and an LCDR3 comprising the amino acid sequence set forth in SEQ ID NO: 455 (or a variant thereof); (y) a HCVR that comprises: an HCDR1 comprising the amino acid sequence set forth in SEQ ID NO: 458 (or a variant thereof), an HCDR2 comprising the amino acid sequence set forth in SEQ ID NO: 459 (or a variant thereof), and an HCDR3 comprising the amino acid sequence set forth in SEQ ID NO: 460 (or a variant thereof); and a LCVR that comprises: an LCDR1 comprising the amino acid sequence set forth in SEQ ID NO: 463 (or a variant thereof), an LCDR2 comprising the amino acid sequence set forth in SEQ ID NO: 464 (or a variant thereof), and an LCDR3 comprising the amino acid sequence set forth in SEQ ID NO: 465 (or a variant thereof); (z) a HCVR that comprises: an HCDR1 comprising the amino acid sequence set forth in SEQ ID NO: 468 (or a variant thereof), an HCDR2 comprising the amino acid sequence set forth in SEQ ID NO: 469 (or a variant thereof), and an HCDR3 comprising the amino acid sequence set forth in SEQ ID NO: 470 (or a variant thereof); and a LCVR that comprises: an LCDR1 comprising the amino acid sequence set forth in SEQ ID NO: 473 (or a variant thereof), an LCDR2 comprising the amino acid sequence set forth in SEQ ID NO: 474 (or a variant thereof), and an LCDR3 comprising the amino acid sequence set forth in SEQ ID NO: 475 (or a variant thereof); (aa) a HCVR that comprises: an HCDR1 comprising the amino acid sequence set forth in SEQ ID NO: 478 (or a variant thereof), an HCDR2 comprising the amino acid sequence set forth in SEQ ID NO: 479 (or a variant thereof), and an HCDR3 comprising the amino acid sequence set forth in SEQ ID NO: 480 (or a variant thereof); and a LCVR that comprises: an LCDR1 comprising the amino acid sequence set forth in SEQ ID NO: 483 (or a variant thereof), an LCDR2 comprising the amino acid sequence set forth in SEQ ID NO: 484 (or a variant thereof), and an LCDR3 comprising the amino acid sequence set forth in SEQ ID NO: 485 (or a variant thereof); (ab) a HCVR that comprises: an HCDR1 comprising the amino acid sequence set forth in SEQ ID NO: 488 (or a variant thereof), an HCDR2 comprising the amino acid sequence set forth in SEQ ID NO: 489 (or a variant thereof), and an HCDR3 comprising the amino acid sequence set forth in SEQ ID NO: 490 (or a variant thereof); and a LCVR that comprises: an LCDR1 comprising the amino acid sequence set forth in SEQ ID NO: 493 (or a variant thereof), an LCDR2 comprising the amino acid sequence set forth in SEQ ID NO: 494 (or a variant thereof), and an LCDR3 comprising the amino acid sequence set forth in SEQ ID NO: 495 (or a variant thereof); (ac) a HCVR that comprises: an HCDR1 comprising the amino acid sequence set forth in SEQ ID NO: 498 (or a variant thereof), an HCDR2 comprising the amino acid sequence set forth in SEQ ID NO: 499 (or a variant thereof), and an HCDR3 comprising the amino acid sequence set forth in SEQ ID NO: 500 (or a variant thereof); and a LCVR that comprises: an LCDR1 comprising the amino acid sequence set forth in SEQ ID NO: 503 (or a variant thereof), an LCDR2 comprising the amino acid sequence set forth in SEQ ID NO: 504 (or a variant thereof), and an LCDR3 comprising the amino acid sequence set forth in SEQ ID NO: 505 (or a variant thereof); (ad) a HCVR that comprises: an HCDR1 comprising the amino acid sequence set forth in SEQ ID NO: 508 (or a variant thereof), an HCDR2 comprising the amino acid sequence set forth in SEQ ID NO: 509 (or a variant thereof), and an HCDR3 comprising the amino acid sequence set forth in SEQ ID NO: 510 (or a variant thereof); and a LCVR that comprises: an LCDR1 comprising the amino acid sequence set forth in SEQ ID NO: 513 (or a variant thereof), an LCDR2 comprising the amino acid sequence set forth in SEQ ID NO: 514 (or a variant thereof), and an LCDR3 comprising the amino acid sequence set forth in SEQ ID NO: 515 (or a variant thereof); (ae) a HCVR that comprises: an HCDR1 comprising the amino acid sequence set forth in SEQ ID NO: 518 (or a variant thereof), an HCDR2 comprising the amino acid sequence set forth in SEQ ID NO: 519 (or a variant thereof), and an HCDR3 comprising the amino acid sequence set forth in SEQ ID NO: 520 (or a variant thereof); and a LCVR that comprises: an LCDR1 comprising the amino acid sequence set forth in SEQ ID NO: 523 (or a variant thereof), an LCDR2 comprising the amino acid sequence set forth in SEQ ID NO: 524 (or a variant thereof), and an LCDR3 comprising the amino acid sequence set forth in SEQ ID NO: 525 (or a variant thereof); and/or (af) a HCVR that comprises: an HCDR1 comprising the amino acid sequence set forth in SEQ ID NO: 528 (or a variant thereof), an HCDR2 comprising the amino acid sequence set forth in SEQ ID NO: 529 (or a variant thereof), and an HCDR3 comprising the amino acid sequence set forth in SEQ ID NO: 530 (or a variant thereof); and a LCVR that comprises: an LCDR1 comprising the amino acid sequence set forth in SEQ ID NO: 533 (or a variant thereof), an LCDR2 comprising the amino acid sequence set forth in SEQ ID NO: 534 (or a variant thereof), and an LCDR3 comprising the amino acid sequence set forth in SEQ ID NO: 535 (or a variant thereof). In some such methods, the anti-TfR antigen binding protein comprises: (a) a HCVR that comprises: an HCDR1 comprising the amino acid sequence set forth in SEQ ID NO: 438 (or a variant thereof), an HCDR2 comprising the amino acid sequence set forth in SEQ ID NO: 439 (or a variant thereof), and an HCDR3 comprising the amino acid sequence set forth in SEQ ID NO: 440 (or a variant thereof); and a LCVR that comprises: an LCDR1 comprising the amino acid sequence set forth in SEQ ID NO: 443 (or a variant thereof), an LCDR2 comprising the amino acid sequence set forth in SEQ ID NO: 444 (or a variant thereof), and an LCDR3 comprising the amino acid sequence set forth in SEQ ID NO: 445 (or a variant thereof); or (b) a HCVR that comprises: an HCDR1 comprising the amino acid sequence set forth in SEQ ID NO: 458 (or a variant thereof), an HCDR2 comprising the amino acid sequence set forth in SEQ ID NO: 459 (or a variant thereof), and an HCDR3 comprising the amino acid sequence set forth in SEQ ID NO: 460 (or a variant thereof); and a LCVR that comprises: an LCDR1 comprising the amino acid sequence set forth in SEQ ID NO: 463 (or a variant thereof), an LCDR2 comprising the amino acid sequence set forth in SEQ ID NO: 464 (or a variant thereof), and an LCDR3 comprising the amino acid sequence set forth in SEQ ID NO: 465 (or a variant thereof). In some such methods, the anti-TfR antigen binding protein comprises: (i) a HCVR that comprises the amino acid sequence set forth in SEQ ID NO: 217 (or a variant thereof); and a LCVR that comprises the amino acid sequence set forth in SEQ ID NO: 222 (or a variant thereof); (ii) a HCVR that comprises the amino acid sequence set forth in SEQ ID NO: 227 (or a variant thereof); and a LCVR that comprises the amino acid sequence set forth in SEQ ID NO: 232 (or a variant thereof); (iii) a HCVR that comprises the amino acid sequence set forth in SEQ ID NO: 237 (or a variant thereof); and a LCVR that comprises the amino acid sequence set forth in SEQ ID NO: 242 (or a variant thereof); (iv) a HCVR that comprises the amino acid sequence set forth in SEQ ID NO: 247 (or a variant thereof); and a LCVR that comprises the amino acid sequence set forth in SEQ ID NO: 252 (or a variant thereof); (v) a HCVR that comprises the amino acid sequence set forth in SEQ ID NO: 257 (or a variant thereof); and a LCVR that comprises the amino acid sequence set forth in SEQ ID NO: 262 (or a variant thereof); (vi) a HCVR that comprises the amino acid sequence set forth in SEQ ID NO: 267 (or a variant thereof); and a LCVR that comprises the amino acid sequence set forth in SEQ ID NO: 272 (or a variant thereof); (vii) a HCVR that comprises the amino acid sequence set forth in SEQ ID NO: 277 (or a variant thereof); and a LCVR that comprises the amino acid sequence set forth in SEQ ID NO: 282 (or a variant thereof); (viii) a HCVR that comprises the amino acid sequence set forth in SEQ ID NO: 287 (or a variant thereof); and a LCVR that comprises the amino acid sequence set forth in SEQ ID NO: 292 (or a variant thereof); (ix) a HCVR that comprises the amino acid sequence set forth in SEQ ID NO: 297 (or a variant thereof); and a LCVR that comprises the amino acid sequence set forth in SEQ ID NO: 302 (or a variant thereof); (x) a HCVR that comprises the amino acid sequence set forth in SEQ ID NO: 307 (or a variant thereof); and a LCVR that comprises the amino acid sequence set forth in SEQ ID NO: 312 (or a variant thereof); (xi) a HCVR that comprises the amino acid sequence set forth in SEQ ID NO: 317 (or a variant thereof); and a LCVR that comprises the amino acid sequence set forth in SEQ ID NO: 322 (or a variant thereof); (xii) a HCVR that comprises the amino acid sequence set forth in SEQ ID NO: 327 (or a variant thereof); and a LCVR that comprises the amino acid sequence set forth in SEQ ID NO: 332 (or a variant thereof); (xiii) a HCVR that comprises the amino acid sequence set forth in SEQ ID NO: 337 (or a variant thereof); and a LCVR that comprises the amino acid sequence set forth in SEQ ID NO: 342 (or a variant thereof); (xiv) a HCVR that comprises the amino acid sequence set forth in SEQ ID NO: 347 (or a variant thereof); and a LCVR that comprises the amino acid sequence set forth in SEQ ID NO: 352 (or a variant thereof); (xv) a HCVR that comprises the amino acid sequence set forth in SEQ ID NO: 357 (or a variant thereof); and a LCVR that comprises the amino acid sequence set forth in SEQ ID NO: 362 (or a variant thereof); (xvi) a HCVR that comprises the amino acid sequence set forth in SEQ ID NO: 367 (or a variant thereof); and a LCVR that comprises the amino acid sequence set forth in SEQ ID NO: 372 (or a variant thereof); (xvii) a HCVR that comprises the amino acid sequence set forth in SEQ ID NO: 377 (or a variant thereof); and a LCVR that comprises the amino acid sequence set forth in SEQ ID NO: 382 (or a variant thereof); (xviii) a HCVR that comprises the amino acid sequence set forth in SEQ ID NO: 387 (or a variant thereof); and a LCVR that comprises the amino acid sequence set forth in SEQ ID NO: 392 (or a variant thereof); (xix) a HCVR that comprises the amino acid sequence set forth in SEQ ID NO: 397 (or a variant thereof); and a LCVR that comprises the amino acid sequence set forth in SEQ ID NO: 402 (or a variant thereof); (xx) a HCVR that comprises the amino acid sequence set forth in SEQ ID NO: 407 (or a variant thereof); and a LCVR that comprises the amino acid sequence set forth in SEQ ID NO: 412 (or a variant thereof); (xxi) a HCVR that comprises the amino acid sequence set forth in SEQ ID NO: 417 (or a variant thereof); and a LCVR that comprises the amino acid sequence set forth in SEQ ID NO: 422 (or a variant thereof); (xxii) a HCVR that comprises the amino acid sequence set forth in SEQ ID NO: 427 (or a variant thereof); and a LCVR that comprises the amino acid sequence set forth in SEQ ID NO: 432 (or a variant thereof); (xxiii) a HCVR that comprises the amino acid sequence set forth in SEQ ID NO: 437 (or a variant thereof); and a LCVR that comprises the amino acid sequence set forth in SEQ ID NO: 442 (or a variant thereof); (xxiv) a HCVR that comprises the amino acid sequence set forth in SEQ ID NO: 447 (or a variant thereof); and a LCVR that comprises the amino acid sequence set forth in SEQ ID NO: 452 (or a variant thereof); (xxv) a HCVR that comprises the amino acid sequence set forth in SEQ ID NO: 457 (or a variant thereof); and a LCVR that comprises the amino acid sequence set forth in SEQ ID NO: 462 (or a variant thereof); (xxvi) a HCVR that comprises the amino acid sequence set forth in SEQ ID NO: 467 (or a variant thereof); and a LCVR that comprises the amino acid sequence set forth in SEQ ID NO: 472 (or a variant thereof); (xxvii) a HCVR that comprises the amino acid sequence set forth in SEQ ID NO: 477 (or a variant thereof); and a LCVR that comprises the amino acid sequence set forth in SEQ ID NO: 482 (or a variant thereof); (xxviii) a HCVR that comprises the amino acid sequence set forth in SEQ ID NO: 487 (or a variant thereof); and a LCVR that comprises the amino acid sequence set forth in SEQ ID NO: 492 (or a variant thereof); (xxix) a HCVR that comprises the amino acid sequence set forth in SEQ ID NO: 497 (or a variant thereof); and a LCVR that comprises the amino acid sequence set forth in SEQ ID NO: 502 (or a variant thereof); (xxx) a HCVR that comprises the amino acid sequence set forth in SEQ ID NO: 507 (or a variant thereof); and a LCVR that comprises the amino acid sequence set forth in SEQ ID NO: 512 (or a variant thereof); (xxxi) a HCVR that comprises the amino acid sequence set forth in SEQ ID NO: 517 (or a variant thereof); and a LCVR that comprises the amino acid sequence set forth in SEQ ID NO: 522 (or a variant thereof); and/or (xxxii) a HCVR that comprises the amino acid sequence set forth in SEQ ID NO: 527 (or a variant thereof); and a LCVR that comprises the amino acid sequence set forth in SEQ ID NO: 532 (or a variant thereof). In some such methods, the anti-TfR antigen binding protein comprises: (i) a HCVR that comprises the amino acid sequence set forth in SEQ ID NO: 437 (or a variant thereof); and a LCVR that comprises the amino acid sequence set forth in SEQ ID NO: 442 (or a variant thereof); or (ii) a HCVR that comprises the amino acid sequence set forth in SEQ ID NO: 457 (or a variant thereof); and a LCVR that comprises the amino acid sequence set forth in SEQ ID NO: 462 (or a variant thereof). In some such methods, the TfR-binding delivery domain comprises an anti-TfR antibody, antibody fragment, or single-chain variable fragment (scFv). In some such methods, the TfR-binding delivery domain is the single-chain variable fragment (scFv), optionally wherein the multidomain therapeutic protein comprises domains arranged in the following orientation: N′-Heavy chain variable region-Light chain variable region-lysosomal alpha-glucosidase-C′ or N′-Light chain variable region-Heavy chain variable region-lysosomal alpha-glucosidase-C′, optionally wherein the scFv and lysosomal alpha-glucosidase are connected by a peptide linker, and optionally wherein the peptide linker which is -(GGGGS)ₘ- (SEQ ID NO: 600); wherein m is 1, 2, 3, 4, 5, 6, 7, 8, 9, or 10, optionally wherein the scFv variable regions are connected by a peptide linker, and optionally wherein the peptide linker which is -(GGGGS)ₘ- (SEQ ID NO: 600); wherein m is 1, 2, 3, 4, 5, 6, 7, 8, 9, or 10. In some such methods, the multidomain therapeutic protein comprises a heavy chain variable region (V_{H}) and a light chain variable region (V_{L}), and a lysosomal alpha-glucosidase, wherein the V_{H}, V_{L} and lysosomal alpha-glucosidase are arranged as follows: (i) V_{L}-V_{H}-lysosomal alpha-glucosidase; (ii) V_{H}-V_{L}-lysosomal alpha-glucosidase; (iii) V_{L}-[(GGGGS)₃]-V_{H}-[(GGGGS)₂]-lysosomal alpha-glucosidase; or V_{H}-[(GGGGS)₃]-V_{L}-[(GGGGS)₂]-lysosomal alpha-glucosidase. In some such methods, the scFv comprises the sequence set forth in any one of SEQ ID NOS: 540, 549, 551, and 554, optionally wherein the scFv comprises the sequence set forth in SEQ ID NO: 554. In some such methods, the scFv consists of the sequence set forth in any one of SEQ ID NOS: 540, 549, 551, and 554, optionally wherein the scFv consists of the sequence set forth in SEQ ID NOS: 554. In some such methods, the scFv coding sequence is at least 90%, at least 91%, at least 92%, at least 93%, at least 94%, at least 95%, at least 96%, at least 97%, at least 98%, or at least 99% identical to any one of SEQ ID NOS: 587-599. Optionally, the scFv coding sequence is at least 90%, at least 91%, at least 92%, at least 93%, at least 94%, at least 95%, at least 96%, at least 97%, at least 98%, or at least 99% identical to any one of SEQ ID NOS: 593-595, optionally wherein the scFv coding sequence is at least 90%, at least 91%, at least 92%, at least 93%, at least 94%, at least 95%, at least 96%, at least 97%, at least 98%, or at least 99% identical to SEQ ID NO: 593. Optionally the scFv coding sequence is at least 90%, at least 91%, at least 92%, at least 93%, at least 94%, at least 95%, at least 96%, at least 97%, at least 98%, or at least 99% identical to any one of SEQ ID NOS: 590-592, optionally wherein the scFv coding sequence is at least 90%, at least 91%, at least 92%, at least 93%, at least 94%, at least 95%, at least 96%, at least 97%, at least 98%, or at least 99% identical to SEQ ID NO: 590. In some such methods, the scFv coding sequence is at least 90%, at least 91%, at least 92%, at least 93%, at least 94%, at least 95%, at least 96%, at least 97%, at least 98%, or at least 99% identical to any one of SEQ ID NOS: 587-599 and encodes an scFv comprising any one of SEQ ID NOS: 540, 549, 551, and 554. Optionally, the scFv coding sequence is at least 90%, at least 91%, at least 92%, at least 93%, at least 94%, at least 95%, at least 96%, at least 97%, at least 98%, or at least 99% identical to any one of SEQ ID NOS: 593-595 and encodes an scFv comprising SEQ ID NO: 554, optionally wherein the scFv coding sequence is at least 90%, at least 91%, at least 92%, at least 93%, at least 94%, at least 95%, at least 96%, at least 97%, at least 98%, or at least 99% identical to SEQ ID NO: 593 and encodes an scFv comprising SEQ ID NO: 554. Optionally, the scFv coding sequence is at least 90%, at least 91%, at least 92%, at least 93%, at least 94%, at least 95%, at least 96%, at least 97%, at least 98%, or at least 99% identical to any one of SEQ ID NOS: 590-592 and encodes an scFv comprising SEQ ID NO: 551, optionally wherein the scFv coding sequence is at least 90%, at least 91%, at least 92%, at least 93%, at least 94%, at least 95%, at least 96%, at least 97%, at least 98%, or at least 99% identical to SEQ ID NO: 590 and encodes an scFv comprising SEQ ID NO: 551. In some such methods, the scFv coding sequence is at least 90%, at least 91%, at least 92%, at least 93%, at least 94%, at least 95%, at least 96%, at least 97%, at least 98%, or at least 99% identical to any one of SEQ ID NOS: 587-599, is codon-optimized and CpG-depleted, and encodes an scFv comprising any one of SEQ ID NOS: 540, 549, 551, and 554. Optionally, the scFv coding sequence is at least 90%, at least 91%, at least 92%, at least 93%, at least 94%, at least 95%, at least 96%, at least 97%, at least 98%, or at least 99% identical to any one of SEQ ID NOS: 593-595, is codon-optimized and CpG-depleted, and encodes an scFv comprising SEQ ID NO: 554, optionally wherein the scFv coding sequence is at least 90%, at least 91%, at least 92%, at least 93%, at least 94%, at least 95%, at least 96%, at least 97%, at least 98%, or at least 99% identical to SEQ ID NO: 593, the scFv coding sequence is codon-optimized and CpG-depleted, and encodes an scFv comprising SEQ ID NO: 554. Optionally, the scFv coding sequence is at least 90%, at least 91%, at least 92%, at least 93%, at least 94%, at least 95%, at least 96%, at least 97%, at least 98%, or at least 99% identical to any one of SEQ ID NOS: 590-592, is codon-optimized and CpG-depleted, and encodes an scFv comprising SEQ ID NO: 551, optionally wherein the scFv coding sequence is at least 90%, at least 91%, at least 92%, at least 93%, at least 94%, at least 95%, at least 96%, at least 97%, at least 98%, or at least 99% identical to SEQ ID NO: 590, the scFv coding sequence is codon-optimized and CpG-depleted, and encodes an scFv comprising SEQ ID NO: 551. In some such methods, the scFv coding sequence comprises the sequence set forth in any one of SEQ ID NOS: 587-599. Optionally, the scFv coding sequence comprises the sequence set forth in any one of SEQ ID NOS: 593-595, optionally wherein the scFv coding sequence comprises the sequence set forth in SEQ ID NO: 593. Optionally, the scFv coding sequence comprises the sequence set forth in any one of SEQ ID NOS: 590-592, optionally wherein the scFv coding sequence comprises the sequence set forth in SEQ ID NO: 590. In some such methods, the scFv coding sequence consists of the sequence set forth in any one of SEQ ID NOS: 587-599. Optionally, the scFv coding sequence consists of the sequence set forth in any one of SEQ ID NOS: 593-595, optionally wherein the scFv coding sequence consists of the sequence set forth in SEQ ID NO: 593. Optionally, the scFv coding sequence consists of the sequence set forth in any one of SEQ ID NOS: 590-592, optionally wherein the scFv coding sequence consists of the sequence set forth in SEQ ID NO: 590.

[0071] In some such methods, the lysosomal alpha-glucosidase lacks the lysosomal alpha-glucosidase signal peptide and propeptide. In some such methods, the lysosomal alpha-glucosidase comprises the sequence set forth in SEQ ID NO: 173. In some such methods, the lysosomal alpha-glucosidase consists of the sequence set forth in SEQ ID NO: 173. In some such methods, the lysosomal alpha-glucosidase coding sequence is codon-optimized or CpG-depleted. In some such methods, the lysosomal alpha-glucosidase coding sequence is codon-optimized and CpG-depleted. In some such methods, the lysosomal alpha-glucosidase coding sequence is at least 90%, at least 91%, at least 92%, at least 93%, at least 94%, at least 95%, at least 96%, at least 97%, at least 98%, or at least 99% identical to any one of SEQ ID NOS: 174-182 and 205-212, optionally wherein the lysosomal alpha-glucosidase coding sequence is at least 90%, at least 91%, at least 92%, at least 93%, at least 94%, at least 95%, at least 96%, at least 97%, at least 98%, or at least 99% identical to SEQ ID NO: 176. In some such methods, the lysosomal alpha-glucosidase coding sequence is at least 90%, at least 91%, at least 92%, at least 93%, at least 94%, at least 95%, at least 96%, at least 97%, at least 98%, or at least 99% identical to any one of SEQ ID NOS: 174-182 and 205-212 and encodes a lysosomal alpha-glucosidase protein comprising SEQ ID NO: 173, optionally wherein the lysosomal alpha-glucosidase coding sequence is at least 90%, at least 91%, at least 92%, at least 93%, at least 94%, at least 95%, at least 96%, at least 97%, at least 98%, or at least 99% identical to SEQ ID NO: 176 and encodes a lysosomal alpha-glucosidase protein comprising SEQ ID NO: 173. In some such methods, the lysosomal alpha-glucosidase coding sequence is at least 90%, at least 91%, at least 92%, at least 93%, at least 94%, at least 95%, at least 96%, at least 97%, at least 98%, or at least 99% identical to any one of SEQ ID NOS: 174-182 and 205-212, is codon-optimized and CpG-depleted, and encodes a lysosomal alpha-glucosidase protein comprising SEQ ID NO: 173, optionally wherein the lysosomal alpha-glucosidase coding sequence is at least 90%, at least 91%, at least 92%, at least 93%, at least 94%, at least 95%, at least 96%, at least 97%, at least 98%, or at least 99% identical to SEQ ID NO: 176, is codon-optimized and CpG-depleted, and encodes a lysosomal alpha-glucosidase protein comprising SEQ ID NO: 173. In some such methods, the lysosomal alpha-glucosidase coding sequence comprises the sequence set forth in any one of SEQ ID NOS: 174-182 and 205-212, optionally wherein the lysosomal alpha-glucosidase coding sequence comprises the sequence set forth in SEQ ID NO: 176. In some such methods, the lysosomal alpha-glucosidase coding sequence consists of the sequence set forth in any one of SEQ ID NOS: 174-182 and 205-212, optionally wherein the lysosomal alpha-glucosidase coding sequence consists of the sequence set forth in SEQ ID NO: 176.

[0072] In some such methods, the lysosomal alpha-glucosidase lacks the lysosomal alpha-glucosidase signal peptide and propeptide. In some such methods, the lysosomal alpha-glucosidase comprises the sequence set forth in SEQ ID NO: 173. In some such methods, the lysosomal alpha-glucosidase consists of the sequence set forth in SEQ ID NO: 173. In some such methods, the lysosomal alpha-glucosidase coding sequence is codon-optimized or CpG-depleted. In some such methods, the lysosomal alpha-glucosidase coding sequence is codon-optimized and CpG-depleted. In some such methods, the lysosomal alpha-glucosidase coding sequence is at least 90%, at least 91%, at least 92%, at least 93%, at least 94%, at least 95%, at least 96%, at least 97%, at least 98%, or at least 99% identical to any one of SEQ ID NOS: 174-182, optionally wherein the lysosomal alpha-glucosidase coding sequence is at least 90%, at least 91%, at least 92%, at least 93%, at least 94%, at least 95%, at least 96%, at least 97%, at least 98%, or at least 99% identical to SEQ ID NO: 176. In some such methods, the lysosomal alpha-glucosidase coding sequence is at least 90%, at least 91%, at least 92%, at least 93%, at least 94%, at least 95%, at least 96%, at least 97%, at least 98%, or at least 99% identical to any one of SEQ ID NOS: 174-182 and encodes a lysosomal alpha-glucosidase protein comprising SEQ ID NO: 173, optionally wherein the lysosomal alpha-glucosidase coding sequence is at least 90%, at least 91%, at least 92%, at least 93%, at least 94%, at least 95%, at least 96%, at least 97%, at least 98%, or at least 99% identical to SEQ ID NO: 176 and encodes a lysosomal alpha-glucosidase protein comprising SEQ ID NO: 173. In some such methods, the lysosomal alpha-glucosidase coding sequence is at least 90%, at least 91%, at least 92%, at least 93%, at least 94%, at least 95%, at least 96%, at least 97%, at least 98%, or at least 99% identical to any one of SEQ ID NOS: 174-182, is codon-optimized and CpG-depleted, and encodes a lysosomal alpha-glucosidase protein comprising SEQ ID NO: 173, optionally wherein the lysosomal alpha-glucosidase coding sequence is at least 90%, at least 91%, at least 92%, at least 93%, at least 94%, at least 95%, at least 96%, at least 97%, at least 98%, or at least 99% identical to SEQ ID NO: 176, is codon-optimized and CpG-depleted, and encodes a lysosomal alpha-glucosidase protein comprising SEQ ID NO: 173. In some such methods, the lysosomal alpha-glucosidase coding sequence comprises the sequence set forth in any one of SEQ ID NOS: 174-182, optionally wherein the lysosomal alpha-glucosidase coding sequence comprises the sequence set forth in SEQ ID NO: 176. In some such methods, the lysosomal alpha-glucosidase coding sequence consists of the sequence set forth in any one of SEQ ID NOS: 174-182, optionally wherein the lysosomal alpha-glucosidase coding sequence consists of the sequence set forth in SEQ ID NO: 176.

[0073] In some such methods, the coding sequence for the multidomain therapeutic protein is codon-optimized or CpG-depleted. In some such methods, the coding sequence for the multidomain therapeutic protein is codon-optimized and CpG-depleted. In some such methods, the multidomain therapeutic protein comprises the sequence set forth in any one of SEQ ID NOS: 570-573, optionally wherein the multidomain therapeutic protein comprises the sequence set forth in SEQ ID NO: 573. In some such methods, the multidomain therapeutic protein consists of the sequence set forth in any one of SEQ ID NOS: 570-573, optionally wherein the multidomain therapeutic protein consists of the sequence set forth in SEQ ID NO: 573. In some such methods, the coding sequence for the multidomain therapeutic protein is at least 90%, at least 91%, at least 92%, at least 93%, at least 94%, at least 95%, at least 96%, at least 97%, at least 98%, or at least 99% identical to any one of SEQ ID NOS: 574-586. Optionally, the coding sequence for the multidomain therapeutic protein is at least 90%, at least 91%, at least 92%, at least 93%, at least 94%, at least 95%, at least 96%, at least 97%, at least 98%, or at least 99% identical to any one of SEQ ID NOS: 584-586, optionally wherein the coding sequence for the multidomain therapeutic protein is at least 90%, at least 91%, at least 92%, at least 93%, at least 94%, at least 95%, at least 96%, at least 97%, at least 98%, or at least 99% identical to SEQ ID NO: 584, optionally wherein the nucleic acid construct comprises a sequence at least 90%, at least 91%, at least 92%, at least 93%, at least 94%, at least 95%, at least 96%, at least 97%, at least 98%, or at least 99% identical to SEQ ID NO: 733. Optionally, the coding sequence for the multidomain therapeutic protein is at least 90%, at least 91%, at least 92%, at least 93%, at least 94%, at least 95%, at least 96%, at least 97%, at least 98%, or at least 99% identical to any one of SEQ ID NOS: 581-583, optionally wherein the coding sequence for the multidomain therapeutic protein is at least 90%, at least 91%, at least 92%, at least 93%, at least 94%, at least 95%, at least 96%, at least 97%, at least 98%, or at least 99% identical to SEQ ID NO: 581, optionally wherein the nucleic acid construct comprises a sequence at least 90%, at least 91%, at least 92%, at least 93%, at least 94%, at least 95%, at least 96%, at least 97%, at least 98%, or at least 99% identical to SEQ ID NO: 729.In some such methods, the coding sequence for the multidomain therapeutic protein is at least 90%, at least 91%, at least 92%, at least 93%, at least 94%, at least 95%, at least 96%, at least 97%, at least 98%, or at least 99% identical to any one of SEQ ID NOS: 574-586, and the multidomain therapeutic protein comprises the sequence set forth in any one of SEQ ID NOS: 570-573. Optionally, the coding sequence for the multidomain therapeutic protein is at least 90%, at least 91%, at least 92%, at least 93%, at least 94%, at least 95%, at least 96%, at least 97%, at least 98%, or at least 99% identical to any one of SEQ ID NOS: 584-586, and the multidomain therapeutic protein comprises the sequence set forth in SEQ ID NO: 573, optionally wherein the coding sequence for the multidomain therapeutic protein is at least 90%, at least 91%, at least 92%, at least 93%, at least 94%, at least 95%, at least 96%, at least 97%, at least 98%, or at least 99% identical to SEQ ID NO: 584, and the multidomain therapeutic protein comprises the sequence set forth in SEQ ID NO: 573, optionally wherein the nucleic acid construct comprises a sequence at least 90%, at least 91%, at least 92%, at least 93%, at least 94%, at least 95%, at least 96%, at least 97%, at least 98%, or at least 99% identical to SEQ ID NO: 733, and the multidomain therapeutic protein comprises the sequence set forth in SEQ ID NO: 573. Optionally, the coding sequence for the multidomain therapeutic protein is at least 90%, at least 91%, at least 92%, at least 93%, at least 94%, at least 95%, at least 96%, at least 97%, at least 98%, or at least 99% identical to any one of SEQ ID NOS: 581-583, and the multidomain therapeutic protein comprises the sequence set forth in SEQ ID NO: 572, optionally wherein the coding sequence for the multidomain therapeutic protein is at least 90%, at least 91%, at least 92%, at least 93%, at least 94%, at least 95%, at least 96%, at least 97%, at least 98%, or at least 99% identical to SEQ ID NO: 581, and the multidomain therapeutic protein comprises the sequence set forth in SEQ ID NO: 572, optionally wherein the nucleic acid construct comprises a sequence at least 90%, at least 91%, at least 92%, at least 93%, at least 94%, at least 95%, at least 96%, at least 97%, at least 98%, or at least 99% identical to SEQ ID NO: 729, and the multidomain therapeutic protein comprises the sequence set forth in SEQ ID NO: 572. In some such methods, the coding sequence for the multidomain therapeutic protein is at least 90%, at least 91%, at least 92%, at least 93%, at least 94%, at least 95%, at least 96%, at least 97%, at least 98%, or at least 99% identical to any one of SEQ ID NOS: 574-586 and is codon-optimized and CpG-depleted, and the multidomain therapeutic protein comprises the sequence set forth in any one of SEQ ID NOS: 570-573. Optionally, the coding sequence for the multidomain therapeutic protein is at least 90%, at least 91%, at least 92%, at least 93%, at least 94%, at least 95%, at least 96%, at least 97%, at least 98%, or at least 99% identical to any one of SEQ ID NOS: 584-586 and is codon-optimized and CpG-depleted, and the multidomain therapeutic protein comprises the sequence set forth in SEQ ID NO: 573, optionally wherein the coding sequence for the multidomain therapeutic protein is at least 90%, at least 91%, at least 92%, at least 93%, at least 94%, at least 95%, at least 96%, at least 97%, at least 98%, or at least 99% identical to SEQ ID NO: 584, the coding sequence for the multidomain therapeutic protein is codon-optimized and CpG-depleted, and the multidomain therapeutic protein comprises the sequence set forth in SEQ ID NO: 573, optionally wherein the nucleic acid construct comprises a sequence at least 90%, at least 91%, at least 92%, at least 93%, at least 94%, at least 95%, at least 96%, at least 97%, at least 98%, or at least 99% identical to SEQ ID NO: 733, the coding sequence for the multidomain therapeutic protein is codon-optimized and CpG-depleted, and the multidomain therapeutic protein comprises the sequence set forth in SEQ ID NO: 573. Optionally, the coding sequence for the multidomain therapeutic protein is at least 90%, at least 91%, at least 92%, at least 93%, at least 94%, at least 95%, at least 96%, at least 97%, at least 98%, or at least 99% identical to any one of SEQ ID NOS: 581-583 and is codon-optimized and CpG-depleted, and the multidomain therapeutic protein comprises the sequence set forth in SEQ ID NO: 572, optionally wherein the coding sequence for the multidomain therapeutic protein is at least 90%, at least 91%, at least 92%, at least 93%, at least 94%, at least 95%, at least 96%, at least 97%, at least 98%, or at least 99% identical to SEQ ID NO: 581, the coding sequence for the multidomain therapeutic protein is codon-optimized and CpG-depleted, and the multidomain therapeutic protein comprises the sequence set forth in SEQ ID NO: 572, optionally wherein the nucleic acid construct comprises a sequence at least 90%, at least 91%, at least 92%, at least 93%, at least 94%, at least 95%, at least 96%, at least 97%, at least 98%, or at least 99% identical to SEQ ID NO: 729, the coding sequence for the multidomain therapeutic protein is codon-optimized and CpG-depleted, and the multidomain therapeutic protein comprises the sequence set forth in SEQ ID NO: 572. In some such methods, the coding sequence for the multidomain therapeutic protein comprises the sequence set forth in any one of SEQ ID NOS: 574-586. Optionally, the coding sequence for the multidomain therapeutic protein comprises the sequence set forth in any one of SEQ ID NOS: 584-586, optionally wherein the coding sequence for the multidomain therapeutic protein comprises the sequence set forth in SEQ ID NO: 584, optionally wherein the nucleic acid construct comprises the sequence set forth in SEQ ID NO: 733. Optionally, the coding sequence for the multidomain therapeutic protein comprises the sequence set forth in any one of SEQ ID NOS: 581-583, optionally wherein the coding sequence for the multidomain therapeutic protein comprises the sequence set forth in SEQ ID NO: 581, optionally wherein the nucleic acid construct comprises the sequence set forth in SEQ ID NO: 729. In some such methods, the coding sequence for the multidomain therapeutic protein consists of the sequence set forth in any one of SEQ ID NOS: 574-586. Optionally, the coding sequence for the multidomain therapeutic protein consists of the sequence set forth in any one of SEQ ID NOS: 584-586, optionally wherein the coding sequence for the multidomain therapeutic protein consists of the sequence set forth in SEQ ID NO: 584, optionally wherein the nucleic acid construct comprises the sequence set forth in SEQ ID NO: 733. Optionally, the coding sequence for the multidomain therapeutic protein consists of the sequence set forth in any one of SEQ ID NOS: 581-583, optionally wherein the coding sequence for the multidomain therapeutic protein consists of the sequence set forth in SEQ ID NO: 581, optionally wherein the nucleic acid construct comprises the sequence set forth in SEQ ID NO: 729. In some such methods, the nucleic acid construct comprises a splice acceptor upstream of the coding sequence for the multidomain therapeutic protein. In some such methods, the nucleic acid construct comprises a polyadenylation signal or sequence downstream of the coding sequence for the multidomain therapeutic protein. In some such methods, the nucleic acid construct comprises a splice acceptor upstream of the coding sequence for the multidomain therapeutic protein, and the nucleic acid construct comprises a polyadenylation signal or sequence downstream of the coding sequence for the multidomain therapeutic protein. In some such methods, the nucleic acid construct does not comprise a homology arm. In some such methods, the nucleic acid construct is inserted into the target genomic locus via non-homologous end joining. In some such methods, the nucleic acid construct comprises homology arms. In some such methods, the nucleic acid construct is inserted into the target genomic locus via homology-directed repair. In some such methods, the nucleic acid construct does not comprise a promoter that drives the expression of the multidomain therapeutic protein. In some such methods, the coding sequence for the multidomain therapeutic protein is operably linked to a promoter, optionally wherein the promoter is a liver-specific promoter. In some such methods, the nucleic acid construct is single-stranded DNA or doublestranded DNA. In some such methods, the nucleic acid construct is single-stranded DNA. In some such methods, the nucleic acid construct comprises from 5′ to 3′: a splice acceptor, the coding sequence for the multidomain therapeutic protein, and a polyadenylation signal or sequence, wherein the lysosomal alpha-glucosidase coding sequence comprises the sequence set forth in any one of SEQ ID NOS: 174-182 and 205-212, optionally wherein the lysosomal alpha-glucosidase coding sequence comprises the sequence set forth in SEQ ID NO: 176, optionally wherein the coding sequence for the multidomain therapeutic protein comprises the sequence set forth in any one of SEQ ID NOS: 574-586, and optionally wherein the coding sequence for the multidomain therapeutic protein comprises the sequence set forth in any one of SEQ ID NOS: 584-586, optionally wherein the coding sequence for the multidomain therapeutic protein comprises the sequence set forth in SEQ ID NO: 584, optionally wherein the nucleic acid construct comprises the sequence set forth in SEQ ID NO: 733, or optionally wherein the coding sequence for the multidomain therapeutic protein comprises the sequence set forth in any one of SEQ ID NOS: 581-583, optionally wherein the coding sequence for the multidomain therapeutic protein comprises the sequence set forth in SEQ ID NO: 581, optionally wherein the nucleic acid construct comprises the sequence set forth in SEQ ID NO: 729, wherein the nucleic acid construct does not comprise a promoter that drives the expression of the multidomain therapeutic protein, and wherein the nucleic acid construct does not comprise a homology arm. In some such methods, the nucleic acid construct comprises from 5′ to 3′: a splice acceptor, the coding sequence for the multidomain therapeutic protein, and a polyadenylation signal or sequence, wherein the lysosomal alpha-glucosidase coding sequence comprises the sequence set forth in any one of SEQ ID NOS: 174-182, optionally wherein the lysosomal alpha-glucosidase coding sequence comprises the sequence set forth in SEQ ID NO: 176, optionally wherein the coding sequence for the multidomain therapeutic protein comprises the sequence set forth in any one of SEQ ID NOS: 574-586, and optionally wherein the coding sequence for the multidomain therapeutic protein comprises the sequence set forth in any one of SEQ ID NOS: 584-586, optionally wherein the coding sequence for the multidomain therapeutic protein comprises the sequence set forth in SEQ ID NO: 584, optionally wherein the nucleic acid construct comprises the sequence set forth in SEQ ID NO: 733, or optionally wherein the coding sequence for the multidomain therapeutic protein comprises the sequence set forth in any one of SEQ ID NOS: 581-583, optionally wherein the coding sequence for the multidomain therapeutic protein comprises the sequence set forth in SEQ ID NO: 581, optionally wherein the nucleic acid construct comprises the sequence set forth in SEQ ID NO: 729, wherein the nucleic acid construct does not comprise a promoter that drives the expression of the multidomain therapeutic protein, and wherein the nucleic acid construct does not comprise a homology arm.

[0074] In some such methods, the nucleic acid construct is in a nucleic acid vector or a lipid nanoparticle. In some such methods, the nucleic acid construct is in the nucleic acid vector. In some such methods, the nucleic acid vector is a viral vector. In some such methods, the nucleic acid vector is an adeno-associated viral (AAV) vector, optionally wherein the nucleic acid construct is flanked by inverted terminal repeats (ITRs) on each end, optionally wherein the ITR on at least one end comprises, consists essentially of, or consists of SEQ ID NO: 160, and optionally wherein the ITR on each end comprises, consists essentially of, or consists of SEQ ID NO: 160. In some such methods, the AAV vector is a single-stranded AAV (ssAAV) vector. In some such methods, the AAV vector is derived from an AAV8 vector, an AAV3B vector, an AAV5 vector, an AAV6 vector, an AAV7 vector, an AAV9 vector, an AAVrh.74 vector, or an AAVhu.37 vector. In some such methods, the AAV vector is a recombinant AAV8 (rAAV8) vector. In some such methods, the AAV vector is a single-stranded rAAV8 vector. In some such methods, the nucleic acid construct comprises from 5′ to 3′: a splice acceptor, the coding sequence for the multidomain therapeutic protein, and a polyadenylation signal or sequence, wherein the lysosomal alpha-glucosidase coding sequence comprises the sequence set forth in any one of SEQ ID NOS: 174-182 and 205-212, optionally wherein the lysosomal alpha-glucosidase coding sequence comprises the sequence set forth in SEQ ID NO: 176, optionally wherein the coding sequence for the multidomain therapeutic protein comprises the sequence set forth in any one of SEQ ID NOS: 574-586, and optionally wherein the coding sequence for the multidomain therapeutic protein comprises the sequence set forth in any one of SEQ ID NOS: 584-586, optionally wherein the coding sequence for the multidomain therapeutic protein comprises the sequence set forth in SEQ ID NO: 584, optionally wherein the nucleic acid construct comprises the sequence set forth in SEQ ID NO: 733, or optionally wherein the coding sequence for the multidomain therapeutic protein comprises the sequence set forth in any one of SEQ ID NOS: 581-583, optionally wherein the coding sequence for the multidomain therapeutic protein comprises the sequence set forth in SEQ ID NO: 581, optionally wherein the nucleic acid construct comprises the sequence set forth in SEQ ID NO: 729, wherein the nucleic acid construct does not comprise a promoter that drives the expression of the multidomain therapeutic protein, wherein the nucleic acid construct does not comprise a homology arm, and wherein the nucleic acid construct is in a single-stranded rAAV8 vector, optionally wherein the nucleic acid construct is flanked by inverted terminal repeats (ITRs) on each end, optionally wherein the ITR on at least one end comprises, consists essentially of, or consists of SEQ ID NO: 160, and optionally wherein the ITR on each end comprises, consists essentially of, or consists of SEQ ID NO: 160. In some such methods, the nucleic acid construct comprises from 5′ to 3′: a splice acceptor, the coding sequence for the multidomain therapeutic protein, and a polyadenylation signal or sequence, wherein the lysosomal alpha-glucosidase coding sequence comprises the sequence set forth in any one of SEQ ID NOS: 174-182, optionally wherein the lysosomal alpha-glucosidase coding sequence comprises the sequence set forth in SEQ ID NO: 176, optionally wherein the coding sequence for the multidomain therapeutic protein comprises the sequence set forth in any one of SEQ ID NOS: 574-586, and optionally wherein the coding sequence for the multidomain therapeutic protein comprises the sequence set forth in any one of SEQ ID NOS: 584-586, optionally wherein the coding sequence for the multidomain therapeutic protein comprises the sequence set forth in SEQ ID NO: 584, optionally wherein the nucleic acid construct comprises the sequence set forth in SEQ ID NO: 733, or optionally wherein the coding sequence for the multidomain therapeutic protein comprises the sequence set forth in any one of SEQ ID NOS: 581-583, optionally wherein the coding sequence for the multidomain therapeutic protein comprises the sequence set forth in SEQ ID NO: 581, optionally wherein the nucleic acid construct comprises the sequence set forth in SEQ ID NO: 729, wherein the nucleic acid construct does not comprise a promoter that drives the expression of the multidomain therapeutic protein, wherein the nucleic acid construct does not comprise a homology arm, and wherein the nucleic acid construct is in a single-stranded rAAV8 vector, optionally wherein the nucleic acid construct is flanked by inverted terminal repeats (ITRs) on each end, optionally wherein the ITR on at least one end comprises, consists essentially of, or consists of SEQ ID NO: 160, and optionally wherein the ITR on each end comprises, consists essentially of, or consists of SEQ ID NO: 160. In some such methods, the nucleic acid construct is CpG-depleted.

[0075] In some such methods, the target genomic locus is an albumin gene, optionally wherein the albumin gene is a human albumin gene. In some such methods, the nuclease target site is in intron 1 of the albumin gene. In some such methods, the nuclease agent comprises: (a) a zinc finger nuclease (ZFN); (b) a transcription activator-like effector nuclease (TALEN); or (c) (i) a Cas protein or a nucleic acid encoding the Cas protein; and (ii) a guide RNA or one or more DNAs encoding the guide RNA, wherein the guide RNA comprises a DNA-targeting segment that targets a guide RNA target sequence, and wherein the guide RNA binds to the Cas protein and targets the Cas protein to the guide RNA target sequence.

[0076] In some such methods, the nuclease agent comprises: (a) a Cas protein or a nucleic acid encoding the Cas protein; and (b) a guide RNA or one or more DNAs encoding the guide RNA, wherein the guide RNA comprises a DNA-targeting segment that targets a guide RNA target sequence, and wherein the guide RNA binds to the Cas protein and targets the Cas protein to the guide RNA target sequence. In some such methods, the guide RNA target sequence is in intron 1 of an albumin gene. In some such methods, the albumin gene is a human albumin gene. In some such methods, the DNA-targeting segment comprises at least 17, at least 18, at least 19, or at least 20 contiguous nucleotides of the sequence set forth in any one of SEQ ID NOS: 30-61, optionally wherein the DNA-targeting segment comprises at least 17, at least 18, at least 19, or at least 20 contiguous nucleotides of the sequence set forth in any one of SEQ ID NOS: 36, 30, 33, and 41. In some such methods, the DNA-targeting segment is at least 90% or at least 95% identical to the sequence set forth in any one of SEQ ID NOS: 30-61, optionally wherein the DNA-targeting segment is at least 90% or at least 95% identical to the sequence set forth in any one of SEQ ID NOS: 36, 30, 33, and 41. In some such methods, the DNA-targeting segment comprises any one of SEQ ID NOS: 30-61, optionally wherein the DNA-targeting segment comprises any one of SEQ ID NOS: 36, 30, 33, and 41. In some such methods, the DNA-targeting segment consists of any one of SEQ ID NOS: 30-61, optionally wherein the DNA-targeting segment consists of any one of SEQ ID NOS: 36, 30, 33, and 41. In some such methods, the guide RNA comprises any one of SEQ ID NOS: 62-125, optionally wherein the guide RNA comprises any one of SEQ ID NOS: 68, 100, 62, 94, 65, 97, 73, and 105. In some such methods, the DNA-targeting segment comprises at least 17, at least 18, at least 19, or at least 20 contiguous nucleotides of SEQ ID NO: 36. In some such methods, the DNA-targeting segment is at least 90% or at least 95% identical to SEQ ID NO: 36. In some such methods, the DNA-targeting segment comprises SEQ ID NO: 36. In some such methods, the DNA-targeting segment consists of SEQ ID NO: 36. In some such methods, the guide RNA comprises SEQ ID NO: 68 or 100.

[0077] In some such methods, the method comprises administering the guide RNA in the form of RNA. In some such methods, the guide RNA comprises at least one modification. In some such methods, the at least one modification comprises a 2′-O-methyl-modified nucleotide. In some such methods, the at least one modification comprises a phosphorothioate bond between nucleotides. In some such methods, the at least one modification comprises a modification at one or more of the first five nucleotides at the 5′ end of the guide RNA. In some such methods, the at least one modification comprises a modification at one or more of the last five nucleotides at the 3′ end of the guide RNA. In some such methods, the at least one modification comprises phosphorothioate bonds between the first four nucleotides at the 5′ end of the guide RNA. In some such methods, the at least one modification comprises phosphorothioate bonds between the last four nucleotides at the 3′ end of the guide RNA. In some such methods, the at least one modification comprises 2′-O-methyl-modified nucleotides at the first three nucleotides at the 5′ end of the guide RNA. In some such methods, the at least one modification comprises 2′-O-methyl-modified nucleotides at the last three nucleotides at the 3′ end of the guide RNA. In some such methods, the at least one modification comprises: (i) phosphorothioate bonds between the first four nucleotides at the 5′ end of the guide RNA; (ii) phosphorothioate bonds between the last four nucleotides at the 3′ end of the guide RNA; (iii) 2′-O-methyl-modified nucleotides at the first three nucleotides at the 5′ end of the guide RNA; and (iv) 2′-O-methyl-modified nucleotides at the last three nucleotides at the 3′ end of the guide RNA. In some such methods, the guide RNA is a single guide RNA (sgRNA). In some such methods, the method comprises administering the guide RNA in the form of RNA, the guide RNA comprises SEQ ID NO: 100, and the guide RNA comprises: (i) phosphorothioate bonds between the first four nucleotides at the 5′ end of the guide RNA; (ii) phosphorothioate bonds between the last four nucleotides at the 3′ end of the guide RNA; (iii) 2′-O-methyl-modified nucleotides at the first three nucleotides at the 5′ end of the guide RNA; and (iv) 2′-O-methyl-modified nucleotides at the last three nucleotides at the 3′ end of the guide RNA.

[0078] In some such methods, the Cas protein is a Cas9 protein. In some such methods, the Cas9 protein is derived from a Streptococcus pyogenes Cas9 protein, a Staphylococcus aureus Cas9 protein, a Campylobacter jejuni Cas9 protein, a Streptococcus thermophilus Cas9 protein, or a Neisseria meningitidis Cas9 protein. In some such methods, the Cas protein is derived from a Streptococcus pyogenes Cas9 protein. In some such methods, the Cas protein comprises the sequence set forth in SEQ ID NO: 11. In some such methods, the nucleic acid encoding the Cas protein is codon-optimized for expression in a mammalian cell or a human cell. In some such methods, the method comprises administering the nucleic acid encoding the Cas protein, wherein the nucleic acid comprises an mRNA encoding the Cas protein. In some such methods, the mRNA encoding the Cas protein comprises at least one modification. In some such methods, the mRNA encoding the Cas protein is modified to comprise a modified uridine at one or more or all uridine positions. In some such methods, the modified uridine is pseudouridine or N1-methyl-pseudouridine, optionally N1-methyl-pseudouridine. In some such methods, the mRNA encoding the Cas protein is fully substituted with pseudouridine or N1-methyl-pseudouridine, optionally N1-methyl-pseudouridine. In some such methods, the modified uridine is pseudouridine. In some such methods, the mRNA encoding the Cas protein is fully substituted with pseudouridine. In some such methods, the mRNA encoding the Cas protein comprises a 5′ cap. In some such methods, the mRNA encoding the Cas protein comprises a polyadenylation sequence. In some such methods, the mRNA encoding the Cas protein comprises the sequence set forth in SEQ ID NO: 226, 225, or 12. In some such methods, the method comprises administering the nucleic acid encoding the Cas protein, wherein the nucleic acid comprises an mRNA encoding the Cas protein, the mRNA encoding the Cas protein comprises the sequence set forth in SEQ ID NO: 226, 225, or 12, and the mRNA encoding the Cas protein is fully substituted with pseudouridine or N1-methyl-pseudouridine, optionally N1-methyl-pseudouridine, comprises a 5′ cap, and comprises a polyadenylation sequence. In some such methods, the method comprises administering the nucleic acid encoding the Cas protein, wherein the nucleic acid comprises an mRNA encoding the Cas protein, the mRNA encoding the Cas protein comprises the sequence set forth in SEQ ID NO: 226, 225, or 12, and the mRNA encoding the Cas protein is fully substituted with pseudouridine, comprises a 5′ cap, and comprises a polyadenylation sequence.

[0079] In some such methods, the method comprises administering the guide RNA in the form of RNA, and the guide RNA comprises SEQ ID NO: 68 or 100, and wherein the method comprises administering the nucleic acid encoding the Cas protein, wherein the nucleic acid comprises an mRNA encoding the Cas protein, and the mRNA encoding the Cas protein comprises the sequence set forth in SEQ ID NO: 226, 225, or 12. In some such methods, the nucleic acid construct comprises from 5′ to 3′: a splice acceptor, the coding sequence for the multidomain therapeutic protein, and a polyadenylation signal or sequence, wherein the lysosomal alpha-glucosidase coding sequence comprises the sequence set forth in any one of SEQ ID NOS: 174-182 and 205-212, optionally wherein the lysosomal alpha-glucosidase coding sequence comprises the sequence set forth in SEQ ID NO: 176, optionally wherein the coding sequence for the multidomain therapeutic protein comprises the sequence set forth in any one of SEQ ID NOS: 574-586, and optionally wherein the coding sequence for the multidomain therapeutic protein comprises the sequence set forth in any one of SEQ ID NOS: 584-586, optionally wherein the coding sequence for the multidomain therapeutic protein comprises the sequence set forth in SEQ ID NO: 584, optionally wherein the nucleic acid construct comprises the sequence set forth in SEQ ID NO: 733, or optionally wherein the coding sequence for the multidomain therapeutic protein comprises the sequence set forth in any one of SEQ ID NOS: 581-583, optionally wherein the coding sequence for the multidomain therapeutic protein comprises the sequence set forth in SEQ ID NO: 581, optionally wherein the nucleic acid construct comprises the sequence set forth in SEQ ID NO: 729, wherein the nucleic acid construct does not comprise a promoter that drives the expression of the multidomain therapeutic protein, wherein the nucleic acid construct does not comprise a homology arm, and wherein the nucleic acid construct is in a single-stranded rAAV8 vector, optionally wherein the nucleic acid construct is flanked by inverted terminal repeats (ITRs) on each end, optionally wherein the ITR on at least one end comprises, consists essentially of, or consists of SEQ ID NO: 160, and optionally wherein the ITR on each end comprises, consists essentially of, or consists of SEQ ID NO: 160. In some such methods, the nucleic acid construct comprises from 5′ to 3′: a splice acceptor, the coding sequence for the multidomain therapeutic protein, and a polyadenylation signal or sequence, wherein the lysosomal alpha-glucosidase coding sequence comprises the sequence set forth in any one of SEQ ID NOS: 174-182, optionally wherein the lysosomal alpha-glucosidase coding sequence comprises the sequence set forth in SEQ ID NO: 176, optionally wherein the coding sequence for the multidomain therapeutic protein comprises the sequence set forth in any one of SEQ ID NOS: 574-586, and optionally wherein the coding sequence for the multidomain therapeutic protein comprises the sequence set forth in any one of SEQ ID NOS: 584-586, optionally wherein the coding sequence for the multidomain therapeutic protein comprises the sequence set forth in SEQ ID NO: 584, optionally wherein the nucleic acid construct comprises the sequence set forth in SEQ ID NO: 733, or optionally wherein the coding sequence for the multidomain therapeutic protein comprises the sequence set forth in any one of SEQ ID NOS: 581-583, optionally wherein the coding sequence for the multidomain therapeutic protein comprises the sequence set forth in SEQ ID NO: 581, optionally wherein the nucleic acid construct comprises the sequence set forth in SEQ ID NO: 729, wherein the nucleic acid construct does not comprise a promoter that drives the expression of the multidomain therapeutic protein, wherein the nucleic acid construct does not comprise a homology arm, and wherein the nucleic acid construct is in a single-stranded rAAV8 vector, optionally wherein the nucleic acid construct is flanked by inverted terminal repeats (ITRs) on each end, optionally wherein the ITR on at least one end comprises, consists essentially of, or consists of SEQ ID NO: 160, and optionally wherein the ITR on each end comprises, consists essentially of, or consists of SEQ ID NO: 160. In some such methods, the method comprises administering the guide RNA in the form of RNA, the guide RNA comprises SEQ ID NO: 100, and the guide RNA comprises: (i) phosphorothioate bonds between the first four nucleotides at the 5′ end of the guide RNA; (ii) phosphorothioate bonds between the last four nucleotides at the 3′ end of the guide RNA; (iii) 2′-O-methyl-modified nucleotides at the first three nucleotides at the 5′ end of the guide RNA; and (iv) 2′-O-methyl-modified nucleotides at the last three nucleotides at the 3′ end of the guide RNA, and wherein the method comprises administering the nucleic acid encoding the Cas protein, wherein the nucleic acid comprises an mRNA encoding the Cas protein, the mRNA encoding the Cas protein comprises the sequence set forth in SEQ ID NO: 226, 225, or 12, and the mRNA encoding the Cas protein is fully substituted with pseudouridine or N1-methyl-pseudouridine, optionally N1-methyl-pseudouridine, comprises a 5′ cap, and comprises a polyadenylation sequence. In some such methods, the method comprises administering the guide RNA in the form of RNA, the guide RNA comprises SEQ ID NO: 100, and the guide RNA comprises: (i) phosphorothioate bonds between the first four nucleotides at the 5′ end of the guide RNA; (ii) phosphorothioate bonds between the last four nucleotides at the 3′ end of the guide RNA; (iii) 2′-O-methyl-modified nucleotides at the first three nucleotides at the 5′ end of the guide RNA; and (iv) 2′-O-methyl-modified nucleotides at the last three nucleotides at the 3′ end of the guide RNA, and wherein the method comprises administering the nucleic acid encoding the Cas protein, wherein the nucleic acid comprises an mRNA encoding the Cas protein, the mRNA encoding the Cas protein comprises the sequence set forth in SEQ ID NO: 226, 225, or 12, and the mRNA encoding the Cas protein is fully substituted with pseudouridine, comprises a 5′ cap, and comprises a polyadenylation sequence. In some such methods, the nucleic acid construct comprises from 5′ to 3′: a splice acceptor, the coding sequence for the multidomain therapeutic protein, and a polyadenylation signal or sequence, wherein the lysosomal alpha-glucosidase coding sequence comprises the sequence set forth in any one of SEQ ID NOS: 174-182 and 205-212, optionally wherein the lysosomal alpha-glucosidase coding sequence comprises the sequence set forth in SEQ ID NO: 176, optionally wherein the coding sequence for the multidomain therapeutic protein comprises the sequence set forth in any one of SEQ ID NOS: 574-586, and optionally wherein the coding sequence for the multidomain therapeutic protein comprises the sequence set forth in any one of SEQ ID NOS: 584-586, optionally wherein the coding sequence for the multidomain therapeutic protein comprises the sequence set forth in SEQ ID NO: 584, optionally wherein the nucleic acid construct comprises the sequence set forth in SEQ ID NO: 733, or optionally wherein the coding sequence for the multidomain therapeutic protein comprises the sequence set forth in any one of SEQ ID NOS: 581-583, optionally wherein the coding sequence for the multidomain therapeutic protein comprises the sequence set forth in SEQ ID NO: 581, optionally wherein the nucleic acid construct comprises the sequence set forth in SEQ ID NO: 729, wherein the nucleic acid construct does not comprise a promoter that drives the expression of the multidomain therapeutic protein, wherein the nucleic acid construct does not comprise a homology arm, and wherein the nucleic acid construct is in a single-stranded rAAV8 vector, optionally wherein the nucleic acid construct is flanked by inverted terminal repeats (ITRs) on each end, optionally wherein the ITR on at least one end comprises, consists essentially of, or consists of SEQ ID NO: 160, and optionally wherein the ITR on each end comprises, consists essentially of, or consists of SEQ ID NO: 160. In some such methods, the nucleic acid construct comprises from 5′ to 3′: a splice acceptor, the coding sequence for the multidomain therapeutic protein, and a polyadenylation signal or sequence, wherein the lysosomal alpha-glucosidase coding sequence comprises the sequence set forth in any one of SEQ ID NOS: 174-182, optionally wherein the lysosomal alpha-glucosidase coding sequence comprises the sequence set forth in SEQ ID NO: 176, optionally wherein the coding sequence for the multidomain therapeutic protein comprises the sequence set forth in any one of SEQ ID NOS: 574-586, and optionally wherein the coding sequence for the multidomain therapeutic protein comprises the sequence set forth in any one of SEQ ID NOS: 584-586, optionally wherein the coding sequence for the multidomain therapeutic protein comprises the sequence set forth in SEQ ID NO: 584, optionally wherein the nucleic acid construct comprises the sequence set forth in SEQ ID NO: 733, or optionally wherein the coding sequence for the multidomain therapeutic protein comprises the sequence set forth in any one of SEQ ID NOS: 581-583, optionally wherein the coding sequence for the multidomain therapeutic protein comprises the sequence set forth in SEQ ID NO: 581, optionally wherein the nucleic acid construct comprises the sequence set forth in SEQ ID NO: 729, wherein the nucleic acid construct does not comprise a promoter that drives the expression of the multidomain therapeutic protein, wherein the nucleic acid construct does not comprise a homology arm, and wherein the nucleic acid construct is in a single-stranded rAAV8 vector, optionally wherein the nucleic acid construct is flanked by inverted terminal repeats (ITRs) on each end, optionally wherein the ITR on at least one end comprises, consists essentially of, or consists of SEQ ID NO: 160, and optionally wherein the ITR on each end comprises, consists essentially of, or consists of SEQ ID NO: 160.

[0080] In some such methods, the Cas protein or the nucleic acid encoding the Cas protein and the guide RNA or the one or more DNAs encoding the guide RNA are associated with a lipid nanoparticle. In some such methods, the lipid nanoparticle comprises a cationic lipid, a neutral lipid, a helper lipid, and a stealth lipid. In some such methods, the cationic lipid is Lipid A ((9Z,12Z)-3-((4,4-bis(octyloxy)butanoyl)oxy)-2-((((3-(diethylamino)propoxy)carbonyl)oxy)methyl)propyl octadeca-9,12-dienoate). In some such methods, the neutral lipid is distearoylphosphatidylcholine or 1,2-distearoyl-sn-glycero-3-phosphocholine (DSPC). In some such methods, the helper lipid is cholesterol. In some such methods, the stealth lipid is PEG2k-DMG. In some such methods, the cationic lipid is Lipid A, the neutral lipid is DSPC, the helper lipid is cholesterol, and the stealth lipid is PEG2k-DMG. In some such methods, the lipid nanoparticle comprises four lipids at the following molar ratios: about 50 mol% Lipid A, about 9 mol% DSPC, about 38 mol% cholesterol, and about 3 mol% PEG2k-DMG.

[0081] In some such methods, the albumin gene is a human albumin gene, wherein the method comprises administering the guide RNA in the form of RNA, and the guide RNA comprises SEQ ID NO: 68 or 100, wherein the method comprises administering the nucleic acid encoding the Cas protein, wherein the nucleic acid comprises an mRNA encoding the Cas protein, and the mRNA encoding the Cas protein comprises the sequence set forth in SEQ ID NO: 226, 225, or 12, and wherein the guide RNA and the mRNA encoding the Cas protein are associated with a lipid nanoparticle comprising Lipid A, DSPC, cholesterol, and PEG2k-DMG, optionally at the following molar ratios: about 50 mol% Lipid A, about 9 mol% DSPC, about 38 mol% cholesterol, and about 3 mol% PEG2k-DMG. In some such methods, the nucleic acid construct comprises from 5′ to 3′: a splice acceptor, the coding sequence for the multidomain therapeutic protein, and a polyadenylation signal or sequence, wherein the lysosomal alpha-glucosidase coding sequence comprises the sequence set forth in any one of SEQ ID NOS: 174-182 and 205-212, optionally wherein the lysosomal alpha-glucosidase coding sequence comprises the sequence set forth in SEQ ID NO: 176, optionally wherein the coding sequence for the multidomain therapeutic protein comprises the sequence set forth in any one of SEQ ID NOS: 574-586, and optionally wherein the coding sequence for the multidomain therapeutic protein comprises the sequence set forth in any one of SEQ ID NOS: 584-586, optionally wherein the coding sequence for the multidomain therapeutic protein comprises the sequence set forth in SEQ ID NO: 584, optionally wherein the nucleic acid construct comprises the sequence set forth in SEQ ID NO: 733, or optionally wherein the coding sequence for the multidomain therapeutic protein comprises the sequence set forth in any one of SEQ ID NOS: 581-583, optionally wherein the coding sequence for the multidomain therapeutic protein comprises the sequence set forth in SEQ ID NO: 581, optionally wherein the nucleic acid construct comprises the sequence set forth in SEQ ID NO: 729, wherein the nucleic acid construct does not comprise a promoter that drives the expression of the multidomain therapeutic protein, wherein the nucleic acid construct does not comprise a homology arm, and wherein the nucleic acid construct is in a single-stranded rAAV8 vector, optionally wherein the nucleic acid construct is flanked by inverted terminal repeats (ITRs) on each end, optionally wherein the ITR on at least one end comprises, consists essentially of, or consists of SEQ ID NO: 160, and optionally wherein the ITR on each end comprises, consists essentially of, or consists of SEQ ID NO: 160. In some such methods, the nucleic acid construct comprises from 5′ to 3′: a splice acceptor, the coding sequence for the multidomain therapeutic protein, and a polyadenylation signal or sequence, wherein the lysosomal alpha-glucosidase coding sequence comprises the sequence set forth in any one of SEQ ID NOS: 174-182, optionally wherein the lysosomal alpha-glucosidase coding sequence comprises the sequence set forth in SEQ ID NO: 176, optionally wherein the coding sequence for the multidomain therapeutic protein comprises the sequence set forth in any one of SEQ ID NOS: 574-586, and optionally wherein the coding sequence for the multidomain therapeutic protein comprises the sequence set forth in any one of SEQ ID NOS: 584-586, optionally wherein the coding sequence for the multidomain therapeutic protein comprises the sequence set forth in SEQ ID NO: 584, optionally wherein the nucleic acid construct comprises the sequence set forth in SEQ ID NO: 733, or optionally wherein the coding sequence for the multidomain therapeutic protein comprises the sequence set forth in any one of SEQ ID NOS: 581-583, optionally wherein the coding sequence for the multidomain therapeutic protein comprises the sequence set forth in SEQ ID NO: 581, optionally wherein the nucleic acid construct comprises the sequence set forth in SEQ ID NO: 729, wherein the nucleic acid construct does not comprise a promoter that drives the expression of the multidomain therapeutic protein, wherein the nucleic acid construct does not comprise a homology arm, and wherein the nucleic acid construct is in a single-stranded rAAV8 vector, optionally wherein the nucleic acid construct is flanked by inverted terminal repeats (ITRs) on each end, optionally wherein the ITR on at least one end comprises, consists essentially of, or consists of SEQ ID NO: 160, and optionally wherein the ITR on each end comprises, consists essentially of, or consists of SEQ ID NO: 160.

[0082] In some such methods, the albumin gene is a human albumin gene, wherein the method comprises administering the guide RNA in the form of RNA, the guide RNA comprises SEQ ID NO: 100, and the guide RNA comprises: (i) phosphorothioate bonds between the first four nucleotides at the 5′ end of the guide RNA; (ii) phosphorothioate bonds between the last four nucleotides at the 3′ end of the guide RNA; (iii) 2′-O-methyl-modified nucleotides at the first three nucleotides at the 5′ end of the guide RNA; and (iv) 2′-O-methyl-modified nucleotides at the last three nucleotides at the 3′ end of the guide RNA, wherein the method comprises administering the nucleic acid encoding the Cas protein, wherein the nucleic acid comprises an mRNA encoding the Cas protein, the mRNA encoding the Cas protein comprises the sequence set forth in SEQ ID NO: 226, 225, or 12, and the mRNA encoding the Cas protein is fully substituted with pseudouridine or N1-methyl-pseudouridine, optionally N1-methyl-pseudouridine, comprises a 5′ cap, and comprises a polyadenylation sequence, and wherein the guide RNA and the mRNA encoding the Cas protein are associated with a lipid nanoparticle comprising Lipid A, DSPC, cholesterol, and PEG2k-DMG, optionally at the following molar ratios: about 50 mol% Lipid A, about 9 mol% DSPC, about 38 mol% cholesterol, and about 3 mol% PEG2k-DMG. In some such methods, the albumin gene is a human albumin gene, wherein the method comprises administering the guide RNA in the form of RNA, the guide RNA comprises SEQ ID NO: 100, and the guide RNA comprises: (i) phosphorothioate bonds between the first four nucleotides at the 5′ end of the guide RNA; (ii) phosphorothioate bonds between the last four nucleotides at the 3′ end of the guide RNA; (iii) 2′-O-methyl-modified nucleotides at the first three nucleotides at the 5′ end of the guide RNA; and (iv) 2′-O-methyl-modified nucleotides at the last three nucleotides at the 3′ end of the guide RNA, wherein the method comprises administering the nucleic acid encoding the Cas protein, wherein the nucleic acid comprises an mRNA encoding the Cas protein, the mRNA encoding the Cas protein comprises the sequence set forth in SEQ ID NO: 226, 225, or 12, and the mRNA encoding the Cas protein is fully substituted with pseudouridine, comprises a 5′ cap, and comprises a polyadenylation sequence, and wherein the guide RNA and the mRNA encoding the Cas protein are associated with a lipid nanoparticle comprising Lipid A, DSPC, cholesterol, and PEG2k-DMG, optionally at the following molar ratios: about 50 mol% Lipid A, about 9 mol% DSPC, about 38 mol% cholesterol, and about 3 mol% PEG2k-DMG. In some such methods, the nucleic acid construct comprises from 5′ to 3′: a splice acceptor, the coding sequence for the multidomain therapeutic protein, and a polyadenylation signal or sequence, wherein the lysosomal alpha-glucosidase coding sequence comprises the sequence set forth in any one of SEQ ID NOS: 174-182 and 205-212, optionally wherein the lysosomal alpha-glucosidase coding sequence comprises the sequence set forth in SEQ ID NO: 176, optionally wherein the coding sequence for the multidomain therapeutic protein comprises the sequence set forth in any one of SEQ ID NOS: 574-586, and optionally wherein the coding sequence for the multidomain therapeutic protein comprises the sequence set forth in any one of SEQ ID NOS: 584-586, optionally wherein the coding sequence for the multidomain therapeutic protein comprises the sequence set forth in SEQ ID NO: 584, optionally wherein the nucleic acid construct comprises the sequence set forth in SEQ ID NO: 733, or optionally wherein the coding sequence for the multidomain therapeutic protein comprises the sequence set forth in any one of SEQ ID NOS: 581-583, optionally wherein the coding sequence for the multidomain therapeutic protein comprises the sequence set forth in SEQ ID NO: 581, optionally wherein the nucleic acid construct comprises the sequence set forth in SEQ ID NO: 729, wherein the nucleic acid construct does not comprise a promoter that drives the expression of the multidomain therapeutic protein, wherein the nucleic acid construct does not comprise a homology arm, and wherein the nucleic acid construct is in a single-stranded rAAV8 vector, optionally wherein the nucleic acid construct is flanked by inverted terminal repeats (ITRs) on each end, optionally wherein the ITR on at least one end comprises, consists essentially of, or consists of SEQ ID NO: 160, and optionally wherein the ITR on each end comprises, consists essentially of, or consists of SEQ ID NO: 160. In some such methods, the nucleic acid construct comprises from 5′ to 3′: a splice acceptor, the coding sequence for the multidomain therapeutic protein, and a polyadenylation signal or sequence, wherein the lysosomal alpha-glucosidase coding sequence comprises the sequence set forth in any one of SEQ ID NOS: 174-182, optionally wherein the lysosomal alpha-glucosidase coding sequence comprises the sequence set forth in SEQ ID NO: 176, optionally wherein the coding sequence for the multidomain therapeutic protein comprises the sequence set forth in any one of SEQ ID NOS: 574-586, and optionally wherein the coding sequence for the multidomain therapeutic protein comprises the sequence set forth in any one of SEQ ID NOS: 584-586, optionally wherein the coding sequence for the multidomain therapeutic protein comprises the sequence set forth in SEQ ID NO: 584, optionally wherein the nucleic acid construct comprises the sequence set forth in SEQ ID NO: 733, optionally wherein the coding sequence for the multidomain therapeutic protein comprises the sequence set forth in any one of SEQ ID NOS: 581-583, optionally wherein the coding sequence for the multidomain therapeutic protein comprises the sequence set forth in SEQ ID NO: 581, optionally wherein the nucleic acid construct comprises the sequence set forth in SEQ ID NO: 729, wherein the nucleic acid construct does not comprise a promoter that drives the expression of the multidomain therapeutic protein, wherein the nucleic acid construct does not comprise a homology arm, and wherein the nucleic acid construct is in a single-stranded rAAV8 vector, optionally wherein the nucleic acid construct is flanked by inverted terminal repeats (ITRs) on each end, optionally wherein the ITR on at least one end comprises, consists essentially of, or consists of SEQ ID NO: 160, and optionally wherein the ITR on each end comprises, consists essentially of, or consists of SEQ ID NO: 160.

[0083] In another aspect, provided is a neonatal cell or a population of neonatal cells made by any of the above methods. In another aspect, provided is a neonatal cell or a population of neonatal cells comprising a nucleic acid construct inserted into a target genomic locus, wherein the nucleic acid construct comprises a coding sequence for a multidomain therapeutic protein comprising a TfR-binding delivery domain fused to a lysosomal alpha-glucosidase inserted into a target genomic locus. In some such neonatal cells or populations of neonatal cells, the neonatal cell is a liver cell or the population of neonatal cells is a population of liver cells. In some such neonatal cells or populations of neonatal cells, the neonatal cell is a hepatocyte or the population of neonatal cells is a population of hepatocytes. In some such neonatal cells or populations of neonatal cells, the neonatal cell is a human cell or the population of neonatal cells is a population of human cells. In some such neonatal cells or populations of neonatal cells, the neonatal cell or the population of neonatal cells is from a human neonatal subject within 24 weeks after birth. In some such neonatal cells or populations of neonatal cells, the neonatal cell or the population of neonatal cells is from a human neonatal subject within 12 weeks after birth. In some such neonatal cells or populations of neonatal cells, the neonatal cell or the population of neonatal cells is from a human neonatal subject within 8 weeks after birth. In some such neonatal cells or populations of neonatal cells, the neonatal cell or the population of neonatal cells is from a human neonatal subject within 4 weeks after birth. In some such neonatal cells or populations of neonatal cells, the neonatal cell is in vitro or ex vivo or the population of neonatal cells is in vitro or ex vivo. In some such neonatal cells or populations of neonatal cells, the neonatal cell is in vivo in a subject or the population of neonatal cells is in vivo.

[0084] In some such neonatal cells or populations of neonatal cells, the multidomain therapeutic protein is expressed. In some such neonatal cells or populations of neonatal cells, the TfR-binding delivery domain is fused to the lysosomal alpha-glucosidase protein via a peptide linker. In some such neonatal cells or populations of neonatal cells, the coding sequence for the TfR-binding delivery domain is codon-optimized or CpG-depleted. In some such neonatal cells or populations of neonatal cells, the coding sequence for the TfR-binding delivery domain is codon-optimized and CpG-depleted. In some such neonatal cells or populations of neonatal cells, the TfR-binding delivery domain comprises an anti-TfR antigen-binding protein. In some such neonatal cells or populations of neonatal cells, the anti-TfR antigen binding protein comprises: (i) a HCVR that comprises the HCDR1, HCDR2 and HCDR3 of a HCVR comprising the amino acid sequence set forth in SEQ ID NO: 217, 227, 237, 247, 257, 267, 277, 287, 297, 307, 317, 327, 337, 347, 357, 367, 377, 387, 397, 407, 417, 427, 437, 447, 457, 467, 477, 487, 497, 507, 517, or 527 (or a variant thereof); and/or (ii) a LCVR that comprises the LCDR1, LCDR2 and LCDR3 of a LCVR comprising the amino acid sequence set forth in SEQ ID NO: 222, 232, 242, 252, 262, 272, 282, 292, 302, 312, 322, 332, 342, 352, 362, 372, 382, 392, 402, 412, 422, 432, 442, 452, 462, 472, 482, 492, 502, 512, 522, or 532 (or a variant thereof). In some such neonatal cells or populations of neonatal cells, the anti-TfR antigen binding protein comprises: (1) a HCVR comprising the HCDR1, HCDR2 and HCDR3 of a HCVR that comprises the amino acid sequence set forth in SEQ ID NO: 217 (or a variant thereof); and a LCVR comprising the LCDR1, LCDR2 and LCDR3 of a LCVR that comprises the amino acid sequence set forth in SEQ ID NO: 222 (or a variant thereof); (2) a HCVR comprising the HCDR1, HCDR2 and HCDR3 of a HCVR that comprises the amino acid sequence set forth in SEQ ID NO: 227 (or a variant thereof); and a LCVR comprising the LCDR1, LCDR2 and LCDR3 of a LCVR that comprises the amino acid sequence set forth in SEQ ID NO: 232 (or a variant thereof); (3) a HCVR comprising the HCDR1, HCDR2 and HCDR3 of a HCVR that comprises the amino acid sequence set forth in SEQ ID NO: 237 (or a variant thereof); and a LCVR comprising the LCDR1, LCDR2 and LCDR3 of a LCVR that comprises the amino acid sequence set forth in SEQ ID NO: 242 (or a variant thereof); (4) a HCVR comprising the HCDR1, HCDR2 and HCDR3 of a HCVR that comprises the amino acid sequence set forth in SEQ ID NO: 247 (or a variant thereof); and a LCVR comprising the LCDR1, LCDR2 and LCDR3 of a LCVR that comprises the amino acid sequence set forth in SEQ ID NO: 252 (or a variant thereof); (5) a HCVR comprising the HCDR1, HCDR2 and HCDR3 of a HCVR that comprises the amino acid sequence set forth in SEQ ID NO: 257 (or a variant thereof); and a LCVR comprising the LCDR1, LCDR2 and LCDR3 of a LCVR that comprises the amino acid sequence set forth in SEQ ID NO: 262 (or a variant thereof); (6) a HCVR comprising the HCDR1, HCDR2 and HCDR3 of a HCVR that comprises the amino acid sequence set forth in SEQ ID NO: 267 (or a variant thereof); and a LCVR comprising the LCDR1, LCDR2 and LCDR3 of a LCVR that comprises the amino acid sequence set forth in SEQ ID NO: 272 (or a variant thereof); (7) a HCVR comprising the HCDR1, HCDR2 and HCDR3 of a HCVR that comprises the amino acid sequence set forth in SEQ ID NO: 277 (or a variant thereof); and a LCVR comprising the LCDR1, LCDR2 and LCDR3 of a LCVR that comprises the amino acid sequence set forth in SEQ ID NO: 282 (or a variant thereof); (8) a HCVR comprising the HCDR1, HCDR2 and HCDR3 of a HCVR that comprises the amino acid sequence set forth in SEQ ID NO: 287 (or a variant thereof); and a LCVR comprising the LCDR1, LCDR2 and LCDR3 of a LCVR that comprises the amino acid sequence set forth in SEQ ID NO: 292 (or a variant thereof); (9) a HCVR comprising the HCDR1, HCDR2 and HCDR3 of a HCVR that comprises the amino acid sequence set forth in SEQ ID NO: 297 (or a variant thereof); and a LCVR comprising the LCDR1, LCDR2 and LCDR3 of a LCVR that comprises the amino acid sequence set forth in SEQ ID NO: 302 (or a variant thereof); (10) a HCVR comprising the HCDR1, HCDR2 and HCDR3 of a HCVR that comprises the amino acid sequence set forth in SEQ ID NO: 307 (or a variant thereof); and a LCVR comprising the LCDR1, LCDR2 and LCDR3 of a LCVR that comprises the amino acid sequence set forth in SEQ ID NO: 312 (or a variant thereof); (11) a HCVR comprising the HCDR1, HCDR2 and HCDR3 of a HCVR that comprises the amino acid sequence set forth in SEQ ID NO: 317 (or a variant thereof); and a LCVR comprising the LCDR1, LCDR2 and LCDR3 of a LCVR that comprises the amino acid sequence set forth in SEQ ID NO: 322 (or a variant thereof); (12) a HCVR comprising the HCDR1, HCDR2 and HCDR3 of a HCVR that comprises the amino acid sequence set forth in SEQ ID NO: 327 (or a variant thereof); and a LCVR comprising the LCDR1, LCDR2 and LCDR3 of a LCVR that comprises the amino acid sequence set forth in SEQ ID NO: 332 (or a variant thereof); (13) a HCVR comprising the HCDR1, HCDR2 and HCDR3 of a HCVR that comprises the amino acid sequence set forth in SEQ ID NO: 337 (or a variant thereof); and a LCVR comprising the LCDR1, LCDR2 and LCDR3 of a LCVR that comprises the amino acid sequence set forth in SEQ ID NO: 342 (or a variant thereof); (14) a HCVR comprising the HCDR1, HCDR2 and HCDR3 of a HCVR that comprises the amino acid sequence set forth in SEQ ID NO: 347 (or a variant thereof); and a LCVR comprising the LCDR1, LCDR2 and LCDR3 of a LCVR that comprises the amino acid sequence set forth in SEQ ID NO: 352 (or a variant thereof); (15) a HCVR comprising the HCDR1, HCDR2 and HCDR3 of a HCVR that comprises the amino acid sequence set forth in SEQ ID NO: 357 (or a variant thereof); and a LCVR comprising the LCDR1, LCDR2 and LCDR3 of a LCVR that comprises the amino acid sequence set forth in SEQ ID NO: 362 (or a variant thereof); (16) a HCVR comprising the HCDR1, HCDR2 and HCDR3 of a HCVR that comprises the amino acid sequence set forth in SEQ ID NO: 367 (or a variant thereof); and a LCVR comprising the LCDR1, LCDR2 and LCDR3 of a LCVR that comprises the amino acid sequence set forth in SEQ ID NO: 372 (or a variant thereof); (17) a HCVR comprising the HCDR1, HCDR2 and HCDR3 of a HCVR that comprises the amino acid sequence set forth in SEQ ID NO: 377 (or a variant thereof); and a LCVR comprising the LCDR1, LCDR2 and LCDR3 of a LCVR that comprises the amino acid sequence set forth in SEQ ID NO: 382 (or a variant thereof); (18) a HCVR comprising the HCDR1, HCDR2 and HCDR3 of a HCVR that comprises the amino acid sequence set forth in SEQ ID NO: 387 (or a variant thereof); and a LCVR comprising the LCDR1, LCDR2 and LCDR3 of a LCVR that comprises the amino acid sequence set forth in SEQ ID NO: 392 (or a variant thereof); (19) a HCVR comprising the HCDR1, HCDR2 and HCDR3 of a HCVR that comprises the amino acid sequence set forth in SEQ ID NO: 397 (or a variant thereof); and a LCVR comprising the LCDR1, LCDR2 and LCDR3 of a LCVR that comprises the amino acid sequence set forth in SEQ ID NO: 402 (or a variant thereof); (20) a HCVR comprising the HCDR1, HCDR2 and HCDR3 of a HCVR that comprises the amino acid sequence set forth in SEQ ID NO: 407 (or a variant thereof); and a LCVR comprising the LCDR1, LCDR2 and LCDR3 of a LCVR that comprises the amino acid sequence set forth in SEQ ID NO: 412 (or a variant thereof); (21) a HCVR comprising the HCDR1, HCDR2 and HCDR3 of a HCVR that comprises the amino acid sequence set forth in SEQ ID NO: 417 (or a variant thereof); and a LCVR comprising the LCDR1, LCDR2 and LCDR3 of a LCVR that comprises the amino acid sequence set forth in SEQ ID NO: 422 (or a variant thereof); (22) a HCVR comprising the HCDR1, HCDR2 and HCDR3 of a HCVR that comprises the amino acid sequence set forth in SEQ ID NO: 427 (or a variant thereof); and a LCVR comprising the LCDR1, LCDR2 and LCDR3 of a LCVR that comprises the amino acid sequence set forth in SEQ ID NO: 432 (or a variant thereof); (23) a HCVR comprising the HCDR1, HCDR2 and HCDR3 of a HCVR that comprises the amino acid sequence set forth in SEQ ID NO: 437 (or a variant thereof); and a LCVR comprising the LCDR1, LCDR2 and LCDR3 of a LCVR that comprises the amino acid sequence set forth in SEQ ID NO: 442 (or a variant thereof); (24) a HCVR comprising the HCDR1, HCDR2 and HCDR3 of a HCVR that comprises the amino acid sequence set forth in SEQ ID NO: 447 (or a variant thereof); and a LCVR comprising the LCDR1, LCDR2 and LCDR3 of a LCVR that comprises the amino acid sequence set forth in SEQ ID NO: 452 (or a variant thereof); (25) a HCVR comprising the HCDR1, HCDR2 and HCDR3 of a HCVR that comprises the amino acid sequence set forth in SEQ ID NO: 457 (or a variant thereof); and a LCVR comprising the LCDR1, LCDR2 and LCDR3 of a LCVR that comprises the amino acid sequence set forth in SEQ ID NO: 462 (or a variant thereof); (26) a HCVR comprising the HCDR1, HCDR2 and HCDR3 of a HCVR that comprises the amino acid sequence set forth in SEQ ID NO: 467 (or a variant thereof); and a LCVR comprising the LCDR1, LCDR2 and LCDR3 of a LCVR that comprises the amino acid sequence set forth in SEQ ID NO: 472 (or a variant thereof); (27) a HCVR comprising the HCDR1, HCDR2 and HCDR3 of a HCVR that comprises the amino acid sequence set forth in SEQ ID NO: 477 (or a variant thereof); and a LCVR comprising the LCDR1, LCDR2 and LCDR3 of a LCVR that comprises the amino acid sequence set forth in SEQ ID NO: 482 (or a variant thereof); (28) a HCVR comprising the HCDR1, HCDR2 and HCDR3 of a HCVR that comprises the amino acid sequence set forth in SEQ ID NO: 487 (or a variant thereof); and a LCVR comprising the LCDR1, LCDR2 and LCDR3 of a LCVR that comprises the amino acid sequence set forth in SEQ ID NO: 492 (or a variant thereof); (29) a HCVR comprising the HCDR1, HCDR2 and HCDR3 of a HCVR that comprises the amino acid sequence set forth in SEQ ID NO: 497 (or a variant thereof); and a LCVR comprising the LCDR1, LCDR2 and LCDR3 of a LCVR that comprises the amino acid sequence set forth in SEQ ID NO: 502 (or a variant thereof); (30) a HCVR comprising the HCDR1, HCDR2 and HCDR3 of a HCVR that comprises the amino acid sequence set forth in SEQ ID NO: 507 (or a variant thereof); and a LCVR comprising the LCDR1, LCDR2 and LCDR3 of a LCVR that comprises the amino acid sequence set forth in SEQ ID NO: 512 (or a variant thereof); (31) a HCVR comprising the HCDR1, HCDR2 and HCDR3 of a HCVR that comprises the amino acid sequence set forth in SEQ ID NO: 517 (or a variant thereof); and a LCVR comprising the LCDR1, LCDR2 and LCDR3 of a LCVR that comprises the amino acid sequence set forth in SEQ ID NO: 522 (or a variant thereof); or (32) a HCVR comprising the HCDR1, HCDR2 and HCDR3 of a HCVR that comprises the amino acid sequence set forth in SEQ ID NO: 527 (or a variant thereof); and a LCVR comprising the LCDR1, LCDR2 and LCDR3 of a LCVR that comprises the amino acid sequence set forth in SEQ ID NO: 532 (or a variant thereof). In some such neonatal cells or populations of neonatal cells, the anti-TfR antigen binding protein comprises: (1) a HCVR comprising the HCDR1, HCDR2 and HCDR3 of a HCVR that comprises the amino acid sequence set forth in SEQ ID NO: 437 (or a variant thereof); and a LCVR comprising the LCDR1, LCDR2 and LCDR3 of a LCVR that comprises the amino acid sequence set forth in SEQ ID NO: 442 (or a variant thereof); or (2) a HCVR comprising the HCDR1, HCDR2 and HCDR3 of a HCVR that comprises the amino acid sequence set forth in SEQ ID NO: 457 (or a variant thereof); and a LCVR comprising the LCDR1, LCDR2 and LCDR3 of a LCVR that comprises the amino acid sequence set forth in SEQ ID NO: 462 (or a variant thereof). In some such neonatal cells or populations of neonatal cells, the anti-TfR antigen binding protein comprises: (a) a HCVR that comprises: an HCDR1 comprising the amino acid sequence set forth in SEQ ID NO: 218 (or a variant thereof), an HCDR2 comprising the amino acid sequence set forth in SEQ ID NO: 219 (or a variant thereof), and an HCDR3 comprising the amino acid sequence set forth in SEQ ID NO: 220 (or a variant thereof); and a LCVR that comprises: an LCDR1 comprising the amino acid sequence set forth in SEQ ID NO: 223 (or a variant thereof), an LCDR2 comprising the amino acid sequence set forth in SEQ ID NO: 224 (or a variant thereof), and an LCDR3 comprising the amino acid sequence set forth in SEQ ID NO: 225 (or a variant thereof); (b) a HCVR that comprises: an HCDR1 comprising the amino acid sequence set forth in SEQ ID NO: 228 (or a variant thereof), an HCDR2 comprising the amino acid sequence set forth in SEQ ID NO: 229 (or a variant thereof), and an HCDR3 comprising the amino acid sequence set forth in SEQ ID NO: 230 (or a variant thereof); and a LCVR that comprises: an LCDR1 comprising the amino acid sequence set forth in SEQ ID NO: 233 (or a variant thereof), an LCDR2 comprising the amino acid sequence set forth in SEQ ID NO: 234 (or a variant thereof), and an LCDR3 comprising the amino acid sequence set forth in SEQ ID NO: 235 (or a variant thereof); (c) a HCVR that comprises: an HCDR1 comprising the amino acid sequence set forth in SEQ ID NO: 238 (or a variant thereof), an HCDR2 comprising the amino acid sequence set forth in SEQ ID NO: 239 (or a variant thereof), and an HCDR3 comprising the amino acid sequence set forth in SEQ ID NO: 240 (or a variant thereof); and a LCVR that comprises: an LCDR1 comprising the amino acid sequence set forth in SEQ ID NO: 243 (or a variant thereof), an LCDR2 comprising the amino acid sequence set forth in SEQ ID NO: 244 (or a variant thereof), and an LCDR3 comprising the amino acid sequence set forth in SEQ ID NO: 245 (or a variant thereof); (d) a HCVR that comprises: an HCDR1 comprising the amino acid sequence set forth in SEQ ID NO: 248 (or a variant thereof), an HCDR2 comprising the amino acid sequence set forth in SEQ ID NO: 249 (or a variant thereof), and an HCDR3 comprising the amino acid sequence set forth in SEQ ID NO: 250 (or a variant thereof); and a LCVR that comprises: an LCDR1 comprising the amino acid sequence set forth in SEQ ID NO: 253 (or a variant thereof), an LCDR2 comprising the amino acid sequence set forth in SEQ ID NO: 254 (or a variant thereof), and an LCDR3 comprising the amino acid sequence set forth in SEQ ID NO: 255 (or a variant thereof); (e) a HCVR that comprises: an HCDR1 comprising the amino acid sequence set forth in SEQ ID NO: 258 (or a variant thereof), an HCDR2 comprising the amino acid sequence set forth in SEQ ID NO: 259 (or a variant thereof), and an HCDR3 comprising the amino acid sequence set forth in SEQ ID NO: 260 (or a variant thereof); and a LCVR that comprises: an LCDR1 comprising the amino acid sequence set forth in SEQ ID NO: 263 (or a variant thereof), an LCDR2 comprising the amino acid sequence set forth in SEQ ID NO: 264 (or a variant thereof), and an LCDR3 comprising the amino acid sequence set forth in SEQ ID NO: 265 (or a variant thereof); (f) a HCVR that comprises: an HCDR1 comprising the amino acid sequence set forth in SEQ ID NO: 268 (or a variant thereof), an HCDR2 comprising the amino acid sequence set forth in SEQ ID NO: 269 (or a variant thereof), and an HCDR3 comprising the amino acid sequence set forth in SEQ ID NO: 270 (or a variant thereof); and a LCVR that comprises: an LCDR1 comprising the amino acid sequence set forth in SEQ ID NO: 273 (or a variant thereof), an LCDR2 comprising the amino acid sequence set forth in SEQ ID NO: 274 (or a variant thereof), and an LCDR3 comprising the amino acid sequence set forth in SEQ ID NO: 275 (or a variant thereof); (g) a HCVR that comprises: an HCDR1 comprising the amino acid sequence set forth in SEQ ID NO: 278 (or a variant thereof), an HCDR2 comprising the amino acid sequence set forth in SEQ ID NO: 279 (or a variant thereof), and an HCDR3 comprising the amino acid sequence set forth in SEQ ID NO: 280 (or a variant thereof); and a LCVR that comprises: an LCDR1 comprising the amino acid sequence set forth in SEQ ID NO: 283 (or a variant thereof), an LCDR2 comprising the amino acid sequence set forth in SEQ ID NO: 284 (or a variant thereof), and an LCDR3 comprising the amino acid sequence set forth in SEQ ID NO: 285 (or a variant thereof); (h) a HCVR that comprises: an HCDR1 comprising the amino acid sequence set forth in SEQ ID NO: 288 (or a variant thereof), an HCDR2 comprising the amino acid sequence set forth in SEQ ID NO: 289 (or a variant thereof), and an HCDR3 comprising the amino acid sequence set forth in SEQ ID NO: 290 (or a variant thereof); and a LCVR that comprises: an LCDR1 comprising the amino acid sequence set forth in SEQ ID NO: 293 (or a variant thereof), an LCDR2 comprising the amino acid sequence set forth in SEQ ID NO: 294 (or a variant thereof), and an LCDR3 comprising the amino acid sequence set forth in SEQ ID NO: 295 (or a variant thereof); (i) a HCVR that comprises: an HCDR1 comprising the amino acid sequence set forth in SEQ ID NO: 298 (or a variant thereof), an HCDR2 comprising the amino acid sequence set forth in SEQ ID NO: 299 (or a variant thereof), and an HCDR3 comprising the amino acid sequence set forth in SEQ ID NO: 300 (or a variant thereof); and a LCVR that comprises: an LCDR1 comprising the amino acid sequence set forth in SEQ ID NO: 303 (or a variant thereof), an LCDR2 comprising the amino acid sequence set forth in SEQ ID NO: 304 (or a variant thereof), and an LCDR3 comprising the amino acid sequence set forth in SEQ ID NO: 305 (or a variant thereof); (j) a HCVR that comprises: an HCDR1 comprising the amino acid sequence set forth in SEQ ID NO: 308 (or a variant thereof), an HCDR2 comprising the amino acid sequence set forth in SEQ ID NO: 309 (or a variant thereof), and an HCDR3 comprising the amino acid sequence set forth in SEQ ID NO: 310 (or a variant thereof); and a LCVR that comprises: an LCDR1 comprising the amino acid sequence set forth in SEQ ID NO: 313 (or a variant thereof), an LCDR2 comprising the amino acid sequence set forth in SEQ ID NO: 314 (or a variant thereof), and an LCDR3 comprising the amino acid sequence set forth in SEQ ID NO: 315 (or a variant thereof); (k) a HCVR that comprises: an HCDR1 comprising the amino acid sequence set forth in SEQ ID NO: 318 (or a variant thereof), an HCDR2 comprising the amino acid sequence set forth in SEQ ID NO: 319 (or a variant thereof), and an HCDR3 comprising the amino acid sequence set forth in SEQ ID NO: 320 (or a variant thereof); and a LCVR that comprises: an LCDR1 comprising the amino acid sequence set forth in SEQ ID NO: 323 (or a variant thereof), an LCDR2 comprising the amino acid sequence set forth in SEQ ID NO: 324 (or a variant thereof), and an LCDR3 comprising the amino acid sequence set forth in SEQ ID NO: 325 (or a variant thereof); (1) a HCVR that comprises: an HCDR1 comprising the amino acid sequence set forth in SEQ ID NO: 328 (or a variant thereof), an HCDR2 comprising the amino acid sequence set forth in SEQ ID NO: 329 (or a variant thereof), and an HCDR3 comprising the amino acid sequence set forth in SEQ ID NO: 330 (or a variant thereof); and a LCVR that comprises: an LCDR1 comprising the amino acid sequence set forth in SEQ ID NO: 333 (or a variant thereof), an LCDR2 comprising the amino acid sequence set forth in SEQ ID NO: 334 (or a variant thereof), and an LCDR3 comprising the amino acid sequence set forth in SEQ ID NO: 335 (or a variant thereof); (m) a HCVR that comprises: an HCDR1 comprising the amino acid sequence set forth in SEQ ID NO: 338 (or a variant thereof), an HCDR2 comprising the amino acid sequence set forth in SEQ ID NO: 339 (or a variant thereof), and an HCDR3 comprising the amino acid sequence set forth in SEQ ID NO: 340 (or a variant thereof); and a LCVR that comprises: an LCDR1 comprising the amino acid sequence set forth in SEQ ID NO: 343 (or a variant thereof), an LCDR2 comprising the amino acid sequence set forth in SEQ ID NO: 344 (or a variant thereof), and an LCDR3 comprising the amino acid sequence set forth in SEQ ID NO: 345 (or a variant thereof); (n) a HCVR that comprises: an HCDR1 comprising the amino acid sequence set forth in SEQ ID NO: 348 (or a variant thereof), an HCDR2 comprising the amino acid sequence set forth in SEQ ID NO: 349 (or a variant thereof), and an HCDR3 comprising the amino acid sequence set forth in SEQ ID NO: 350 (or a variant thereof); and a LCVR that comprises: an LCDR1 comprising the amino acid sequence set forth in SEQ ID NO: 353 (or a variant thereof), an LCDR2 comprising the amino acid sequence set forth in SEQ ID NO: 354 (or a variant thereof), and an LCDR3 comprising the amino acid sequence set forth in SEQ ID NO: 355 (or a variant thereof); (o) a HCVR that comprises: an HCDR1 comprising the amino acid sequence set forth in SEQ ID NO: 358 (or a variant thereof), an HCDR2 comprising the amino acid sequence set forth in SEQ ID NO: 359 (or a variant thereof), and an HCDR3 comprising the amino acid sequence set forth in SEQ ID NO: 360 (or a variant thereof); and a LCVR that comprises: an LCDR1 comprising the amino acid sequence set forth in SEQ ID NO: 363 (or a variant thereof), an LCDR2 comprising the amino acid sequence set forth in SEQ ID NO: 364 (or a variant thereof), and an LCDR3 comprising the amino acid sequence set forth in SEQ ID NO: 365 (or a variant thereof); (p) a HCVR that comprises: an HCDR1 comprising the amino acid sequence set forth in SEQ ID NO: 368 (or a variant thereof), an HCDR2 comprising the amino acid sequence set forth in SEQ ID NO: 369 (or a variant thereof), and an HCDR3 comprising the amino acid sequence set forth in SEQ ID NO: 370 (or a variant thereof); and a LCVR that comprises: an LCDR1 comprising the amino acid sequence set forth in SEQ ID NO: 373 (or a variant thereof), an LCDR2 comprising the amino acid sequence set forth in SEQ ID NO: 374 (or a variant thereof), and an LCDR3 comprising the amino acid sequence set forth in SEQ ID NO: 375 (or a variant thereof); (q) a HCVR that comprises: an HCDR1 comprising the amino acid sequence set forth in SEQ ID NO: 378 (or a variant thereof), an HCDR2 comprising the amino acid sequence set forth in SEQ ID NO: 379 (or a variant thereof), and an HCDR3 comprising the amino acid sequence set forth in SEQ ID NO: 380 (or a variant thereof); and a LCVR that comprises: an LCDR1 comprising the amino acid sequence set forth in SEQ ID NO: 383 (or a variant thereof), an LCDR2 comprising the amino acid sequence set forth in SEQ ID NO: 384 (or a variant thereof), and an LCDR3 comprising the amino acid sequence set forth in SEQ ID NO: 385 (or a variant thereof); (r) a HCVR that comprises: an HCDR1 comprising the amino acid sequence set forth in SEQ ID NO: 388 (or a variant thereof), an HCDR2 comprising the amino acid sequence set forth in SEQ ID NO: 389 (or a variant thereof), and an HCDR3 comprising the amino acid sequence set forth in SEQ ID NO: 390 (or a variant thereof); and a LCVR that comprises: an LCDR1 comprising the amino acid sequence set forth in SEQ ID NO: 393 (or a variant thereof), an LCDR2 comprising the amino acid sequence set forth in SEQ ID NO: 394 (or a variant thereof), and an LCDR3 comprising the amino acid sequence set forth in SEQ ID NO: 395 (or a variant thereof); (s) a HCVR that comprises: an HCDR1 comprising the amino acid sequence set forth in SEQ ID NO: 398 (or a variant thereof), an HCDR2 comprising the amino acid sequence set forth in SEQ ID NO: 399 (or a variant thereof), and an HCDR3 comprising the amino acid sequence set forth in SEQ ID NO: 400 (or a variant thereof); and a LCVR that comprises: an LCDR1 comprising the amino acid sequence set forth in SEQ ID NO: 403 (or a variant thereof), an LCDR2 comprising the amino acid sequence set forth in SEQ ID NO: 404 (or a variant thereof), and an LCDR3 comprising the amino acid sequence set forth in SEQ ID NO: 405 (or a variant thereof); (t) a HCVR that comprises: an HCDR1 comprising the amino acid sequence set forth in SEQ ID NO: 408 (or a variant thereof), an HCDR2 comprising the amino acid sequence set forth in SEQ ID NO: 409 (or a variant thereof), and an HCDR3 comprising the amino acid sequence set forth in SEQ ID NO: 410 (or a variant thereof); and a LCVR that comprises: an LCDR1 comprising the amino acid sequence set forth in SEQ ID NO: 413 (or a variant thereof), an LCDR2 comprising the amino acid sequence set forth in SEQ ID NO: 414 (or a variant thereof), and an LCDR3 comprising the amino acid sequence set forth in SEQ ID NO: 415 (or a variant thereof); (u) a HCVR that comprises: an HCDR1 comprising the amino acid sequence set forth in SEQ ID NO: 418 (or a variant thereof), an HCDR2 comprising the amino acid sequence set forth in SEQ ID NO: 419 (or a variant thereof), and an HCDR3 comprising the amino acid sequence set forth in SEQ ID NO: 420 (or a variant thereof); and a LCVR that comprises: an LCDR1 comprising the amino acid sequence set forth in SEQ ID NO: 423 (or a variant thereof), an LCDR2 comprising the amino acid sequence set forth in SEQ ID NO: 424 (or a variant thereof), and an LCDR3 comprising the amino acid sequence set forth in SEQ ID NO: 425 (or a variant thereof); (v) a HCVR that comprises: an HCDR1 comprising the amino acid sequence set forth in SEQ ID NO: 428 (or a variant thereof), an HCDR2 comprising the amino acid sequence set forth in SEQ ID NO: 429 (or a variant thereof), and an HCDR3 comprising the amino acid sequence set forth in SEQ ID NO: 430 (or a variant thereof); and a LCVR that comprises: an LCDR1 comprising the amino acid sequence set forth in SEQ ID NO: 433 (or a variant thereof), an LCDR2 comprising the amino acid sequence set forth in SEQ ID NO: 434 (or a variant thereof), and an LCDR3 comprising the amino acid sequence set forth in SEQ ID NO: 435 (or a variant thereof); (w) a HCVR that comprises: an HCDR1 comprising the amino acid sequence set forth in SEQ ID NO: 438 (or a variant thereof), an HCDR2 comprising the amino acid sequence set forth in SEQ ID NO: 439 (or a variant thereof), and an HCDR3 comprising the amino acid sequence set forth in SEQ ID NO: 440 (or a variant thereof); and a LCVR that comprises: an LCDR1 comprising the amino acid sequence set forth in SEQ ID NO: 443 (or a variant thereof), an LCDR2 comprising the amino acid sequence set forth in SEQ ID NO: 444 (or a variant thereof), and an LCDR3 comprising the amino acid sequence set forth in SEQ ID NO: 445 (or a variant thereof); (x) a HCVR that comprises: an HCDR1 comprising the amino acid sequence set forth in SEQ ID NO: 448 (or a variant thereof), an HCDR2 comprising the amino acid sequence set forth in SEQ ID NO: 449 (or a variant thereof), and an HCDR3 comprising the amino acid sequence set forth in SEQ ID NO: 450 (or a variant thereof); and a LCVR that comprises: an LCDR1 comprising the amino acid sequence set forth in SEQ ID NO: 453 (or a variant thereof), an LCDR2 comprising the amino acid sequence set forth in SEQ ID NO: 454 (or a variant thereof), and an LCDR3 comprising the amino acid sequence set forth in SEQ ID NO: 455 (or a variant thereof); (y) a HCVR that comprises: an HCDR1 comprising the amino acid sequence set forth in SEQ ID NO: 458 (or a variant thereof), an HCDR2 comprising the amino acid sequence set forth in SEQ ID NO: 459 (or a variant thereof), and an HCDR3 comprising the amino acid sequence set forth in SEQ ID NO: 460 (or a variant thereof); and a LCVR that comprises: an LCDR1 comprising the amino acid sequence set forth in SEQ ID NO: 463 (or a variant thereof), an LCDR2 comprising the amino acid sequence set forth in SEQ ID NO: 464 (or a variant thereof), and an LCDR3 comprising the amino acid sequence set forth in SEQ ID NO: 465 (or a variant thereof); (z) a HCVR that comprises: an HCDR1 comprising the amino acid sequence set forth in SEQ ID NO: 468 (or a variant thereof), an HCDR2 comprising the amino acid sequence set forth in SEQ ID NO: 469 (or a variant thereof), and an HCDR3 comprising the amino acid sequence set forth in SEQ ID NO: 470 (or a variant thereof); and a LCVR that comprises: an LCDR1 comprising the amino acid sequence set forth in SEQ ID NO: 473 (or a variant thereof), an LCDR2 comprising the amino acid sequence set forth in SEQ ID NO: 474 (or a variant thereof), and an LCDR3 comprising the amino acid sequence set forth in SEQ ID NO: 475 (or a variant thereof); (aa) a HCVR that comprises: an HCDR1 comprising the amino acid sequence set forth in SEQ ID NO: 478 (or a variant thereof), an HCDR2 comprising the amino acid sequence set forth in SEQ ID NO: 479 (or a variant thereof), and an HCDR3 comprising the amino acid sequence set forth in SEQ ID NO: 480 (or a variant thereof); and a LCVR that comprises: an LCDR1 comprising the amino acid sequence set forth in SEQ ID NO: 483 (or a variant thereof), an LCDR2 comprising the amino acid sequence set forth in SEQ ID NO: 484 (or a variant thereof), and an LCDR3 comprising the amino acid sequence set forth in SEQ ID NO: 485 (or a variant thereof); (ab) a HCVR that comprises: an HCDR1 comprising the amino acid sequence set forth in SEQ ID NO: 488 (or a variant thereof), an HCDR2 comprising the amino acid sequence set forth in SEQ ID NO: 489 (or a variant thereof), and an HCDR3 comprising the amino acid sequence set forth in SEQ ID NO: 490 (or a variant thereof); and a LCVR that comprises: an LCDR1 comprising the amino acid sequence set forth in SEQ ID NO: 493 (or a variant thereof), an LCDR2 comprising the amino acid sequence set forth in SEQ ID NO: 494 (or a variant thereof), and an LCDR3 comprising the amino acid sequence set forth in SEQ ID NO: 495 (or a variant thereof); (ac) a HCVR that comprises: an HCDR1 comprising the amino acid sequence set forth in SEQ ID NO: 498 (or a variant thereof), an HCDR2 comprising the amino acid sequence set forth in SEQ ID NO: 499 (or a variant thereof), and an HCDR3 comprising the amino acid sequence set forth in SEQ ID NO: 500 (or a variant thereof); and a LCVR that comprises: an LCDR1 comprising the amino acid sequence set forth in SEQ ID NO: 503 (or a variant thereof), an LCDR2 comprising the amino acid sequence set forth in SEQ ID NO: 504 (or a variant thereof), and an LCDR3 comprising the amino acid sequence set forth in SEQ ID NO: 505 (or a variant thereof); (ad) a HCVR that comprises: an HCDR1 comprising the amino acid sequence set forth in SEQ ID NO: 508 (or a variant thereof), an HCDR2 comprising the amino acid sequence set forth in SEQ ID NO: 509 (or a variant thereof), and an HCDR3 comprising the amino acid sequence set forth in SEQ ID NO: 510 (or a variant thereof); and a LCVR that comprises: an LCDR1 comprising the amino acid sequence set forth in SEQ ID NO: 513 (or a variant thereof), an LCDR2 comprising the amino acid sequence set forth in SEQ ID NO: 514 (or a variant thereof), and an LCDR3 comprising the amino acid sequence set forth in SEQ ID NO: 515 (or a variant thereof); (ae) a HCVR that comprises: an HCDR1 comprising the amino acid sequence set forth in SEQ ID NO: 518 (or a variant thereof), an HCDR2 comprising the amino acid sequence set forth in SEQ ID NO: 519 (or a variant thereof), and an HCDR3 comprising the amino acid sequence set forth in SEQ ID NO: 520 (or a variant thereof); and a LCVR that comprises: an LCDR1 comprising the amino acid sequence set forth in SEQ ID NO: 523 (or a variant thereof), an LCDR2 comprising the amino acid sequence set forth in SEQ ID NO: 524 (or a variant thereof), and an LCDR3 comprising the amino acid sequence set forth in SEQ ID NO: 525 (or a variant thereof); and/or (af) a HCVR that comprises: an HCDR1 comprising the amino acid sequence set forth in SEQ ID NO: 528 (or a variant thereof), an HCDR2 comprising the amino acid sequence set forth in SEQ ID NO: 529 (or a variant thereof), and an HCDR3 comprising the amino acid sequence set forth in SEQ ID NO: 530 (or a variant thereof); and a LCVR that comprises: an LCDR1 comprising the amino acid sequence set forth in SEQ ID NO: 533 (or a variant thereof), an LCDR2 comprising the amino acid sequence set forth in SEQ ID NO: 534 (or a variant thereof), and an LCDR3 comprising the amino acid sequence set forth in SEQ ID NO: 535 (or a variant thereof). In some such neonatal cells or populations of neonatal cells, the anti-TfR antigen binding protein comprises: (a) a HCVR that comprises: an HCDR1 comprising the amino acid sequence set forth in SEQ ID NO: 438 (or a variant thereof), an HCDR2 comprising the amino acid sequence set forth in SEQ ID NO: 439 (or a variant thereof), and an HCDR3 comprising the amino acid sequence set forth in SEQ ID NO: 440 (or a variant thereof); and a LCVR that comprises: an LCDR1 comprising the amino acid sequence set forth in SEQ ID NO: 443 (or a variant thereof), an LCDR2 comprising the amino acid sequence set forth in SEQ ID NO: 444 (or a variant thereof), and an LCDR3 comprising the amino acid sequence set forth in SEQ ID NO: 445 (or a variant thereof); or (b) a HCVR that comprises: an HCDR1 comprising the amino acid sequence set forth in SEQ ID NO: 458 (or a variant thereof), an HCDR2 comprising the amino acid sequence set forth in SEQ ID NO: 459 (or a variant thereof), and an HCDR3 comprising the amino acid sequence set forth in SEQ ID NO: 460 (or a variant thereof); and a LCVR that comprises: an LCDR1 comprising the amino acid sequence set forth in SEQ ID NO: 463 (or a variant thereof), an LCDR2 comprising the amino acid sequence set forth in SEQ ID NO: 464 (or a variant thereof), and an LCDR3 comprising the amino acid sequence set forth in SEQ ID NO: 465 (or a variant thereof). In some such neonatal cells or populations of neonatal cells, the anti-TfR antigen binding protein comprises: (i) a HCVR that comprises the amino acid sequence set forth in SEQ ID NO: 217 (or a variant thereof); and a LCVR that comprises the amino acid sequence set forth in SEQ ID NO: 222 (or a variant thereof); (ii) a HCVR that comprises the amino acid sequence set forth in SEQ ID NO: 227 (or a variant thereof); and a LCVR that comprises the amino acid sequence set forth in SEQ ID NO: 232 (or a variant thereof); (iii) a HCVR that comprises the amino acid sequence set forth in SEQ ID NO: 237 (or a variant thereof); and a LCVR that comprises the amino acid sequence set forth in SEQ ID NO: 242 (or a variant thereof); (iv) a HCVR that comprises the amino acid sequence set forth in SEQ ID NO: 247 (or a variant thereof); and a LCVR that comprises the amino acid sequence set forth in SEQ ID NO: 252 (or a variant thereof); (v) a HCVR that comprises the amino acid sequence set forth in SEQ ID NO: 257 (or a variant thereof); and a LCVR that comprises the amino acid sequence set forth in SEQ ID NO: 262 (or a variant thereof); (vi) a HCVR that comprises the amino acid sequence set forth in SEQ ID NO: 267 (or a variant thereof); and a LCVR that comprises the amino acid sequence set forth in SEQ ID NO: 272 (or a variant thereof); (vii) a HCVR that comprises the amino acid sequence set forth in SEQ ID NO: 277 (or a variant thereof); and a LCVR that comprises the amino acid sequence set forth in SEQ ID NO: 282 (or a variant thereof); (viii) a HCVR that comprises the amino acid sequence set forth in SEQ ID NO: 287 (or a variant thereof); and a LCVR that comprises the amino acid sequence set forth in SEQ ID NO: 292 (or a variant thereof); (ix) a HCVR that comprises the amino acid sequence set forth in SEQ ID NO: 297 (or a variant thereof); and a LCVR that comprises the amino acid sequence set forth in SEQ ID NO: 302 (or a variant thereof); (x) a HCVR that comprises the amino acid sequence set forth in SEQ ID NO: 307 (or a variant thereof); and a LCVR that comprises the amino acid sequence set forth in SEQ ID NO: 312 (or a variant thereof); (xi) a HCVR that comprises the amino acid sequence set forth in SEQ ID NO: 317 (or a variant thereof); and a LCVR that comprises the amino acid sequence set forth in SEQ ID NO: 322 (or a variant thereof); (xii) a HCVR that comprises the amino acid sequence set forth in SEQ ID NO: 327 (or a variant thereof); and a LCVR that comprises the amino acid sequence set forth in SEQ ID NO: 332 (or a variant thereof); (xiii) a HCVR that comprises the amino acid sequence set forth in SEQ ID NO: 337 (or a variant thereof); and a LCVR that comprises the amino acid sequence set forth in SEQ ID NO: 342 (or a variant thereof); (xiv) a HCVR that comprises the amino acid sequence set forth in SEQ ID NO: 347 (or a variant thereof); and a LCVR that comprises the amino acid sequence set forth in SEQ ID NO: 352 (or a variant thereof); (xv) a HCVR that comprises the amino acid sequence set forth in SEQ ID NO: 357 (or a variant thereof); and a LCVR that comprises the amino acid sequence set forth in SEQ ID NO: 362 (or a variant thereof); (xvi) a HCVR that comprises the amino acid sequence set forth in SEQ ID NO: 367 (or a variant thereof); and a LCVR that comprises the amino acid sequence set forth in SEQ ID NO: 372 (or a variant thereof); (xvii) a HCVR that comprises the amino acid sequence set forth in SEQ ID NO: 377 (or a variant thereof); and a LCVR that comprises the amino acid sequence set forth in SEQ ID NO: 382 (or a variant thereof); (xviii) a HCVR that comprises the amino acid sequence set forth in SEQ ID NO: 387 (or a variant thereof); and a LCVR that comprises the amino acid sequence set forth in SEQ ID NO: 392 (or a variant thereof); (xix) a HCVR that comprises the amino acid sequence set forth in SEQ ID NO: 397 (or a variant thereof); and a LCVR that comprises the amino acid sequence set forth in SEQ ID NO: 402 (or a variant thereof); (xx) a HCVR that comprises the amino acid sequence set forth in SEQ ID NO: 407 (or a variant thereof); and a LCVR that comprises the amino acid sequence set forth in SEQ ID NO: 412 (or a variant thereof); (xxi) a HCVR that comprises the amino acid sequence set forth in SEQ ID NO: 417 (or a variant thereof); and a LCVR that comprises the amino acid sequence set forth in SEQ ID NO: 422 (or a variant thereof); (xxii) a HCVR that comprises the amino acid sequence set forth in SEQ ID NO: 427 (or a variant thereof); and a LCVR that comprises the amino acid sequence set forth in SEQ ID NO: 432 (or a variant thereof); (xxiii) a HCVR that comprises the amino acid sequence set forth in SEQ ID NO: 437 (or a variant thereof); and a LCVR that comprises the amino acid sequence set forth in SEQ ID NO: 442 (or a variant thereof); (xxiv) a HCVR that comprises the amino acid sequence set forth in SEQ ID NO: 447 (or a variant thereof); and a LCVR that comprises the amino acid sequence set forth in SEQ ID NO: 452 (or a variant thereof); (xxv) a HCVR that comprises the amino acid sequence set forth in SEQ ID NO: 457 (or a variant thereof); and a LCVR that comprises the amino acid sequence set forth in SEQ ID NO: 462 (or a variant thereof); (xxvi) a HCVR that comprises the amino acid sequence set forth in SEQ ID NO: 467 (or a variant thereof); and a LCVR that comprises the amino acid sequence set forth in SEQ ID NO: 472 (or a variant thereof); (xxvii) a HCVR that comprises the amino acid sequence set forth in SEQ ID NO: 477 (or a variant thereof); and a LCVR that comprises the amino acid sequence set forth in SEQ ID NO: 482 (or a variant thereof); (xxviii) a HCVR that comprises the amino acid sequence set forth in SEQ ID NO: 487 (or a variant thereof); and a LCVR that comprises the amino acid sequence set forth in SEQ ID NO: 492 (or a variant thereof); (xxix) a HCVR that comprises the amino acid sequence set forth in SEQ ID NO: 497 (or a variant thereof); and a LCVR that comprises the amino acid sequence set forth in SEQ ID NO: 502 (or a variant thereof); (xxx) a HCVR that comprises the amino acid sequence set forth in SEQ ID NO: 507 (or a variant thereof); and a LCVR that comprises the amino acid sequence set forth in SEQ ID NO: 512 (or a variant thereof); (xxxi) a HCVR that comprises the amino acid sequence set forth in SEQ ID NO: 517 (or a variant thereof); and a LCVR that comprises the amino acid sequence set forth in SEQ ID NO: 522 (or a variant thereof); and/or (xxxii) a HCVR that comprises the amino acid sequence set forth in SEQ ID NO: 527 (or a variant thereof); and a LCVR that comprises the amino acid sequence set forth in SEQ ID NO: 532 (or a variant thereof). In some such neonatal cells or populations of neonatal cells, the anti-TfR antigen binding protein comprises: (i) a HCVR that comprises the amino acid sequence set forth in SEQ ID NO: 437 (or a variant thereof); and a LCVR that comprises the amino acid sequence set forth in SEQ ID NO: 442 (or a variant thereof); or (ii) a HCVR that comprises the amino acid sequence set forth in SEQ ID NO: 457 (or a variant thereof); and a LCVR that comprises the amino acid sequence set forth in SEQ ID NO: 462 (or a variant thereof). In some such neonatal cells or populations of neonatal cells, the TfR-binding delivery domain comprises an anti-TfR antibody, antibody fragment, or single-chain variable fragment (scFv). In some such neonatal cells or populations of neonatal cells, the TfR-binding delivery domain is the single-chain variable fragment (scFv), optionally wherein the multidomain therapeutic protein comprises domains arranged in the following orientation: N′-Heavy chain variable region-Light chain variable region-lysosomal alpha-glucosidase-C′ or N′-Light chain variable region-Heavy chain variable region-lysosomal alpha-glucosidase-C′, optionally wherein the scFv and lysosomal alpha-glucosidase are connected by a peptide linker, and optionally wherein the peptide linker which is -(GGGGS)ₘ- (SEQ ID NO: 600); wherein m is 1, 2, 3, 4, 5, 6, 7, 8, 9, or 10, optionally wherein the scFv variable regions are connected by a peptide linker, and optionally wherein the peptide linker which is -(GGGGS)ₘ- (SEQ ID NO: 600); wherein m is 1, 2, 3, 4, 5, 6, 7, 8, 9, or 10. In some such neonatal cells or populations of neonatal cells, the multidomain therapeutic protein comprises a heavy chain variable region (V_{H}) and a light chain variable region (V_{L}), and a lysosomal alpha-glucosidase, wherein the V_{H}, V_{L} and lysosomal alpha-glucosidase are arranged as follows: (i) V_{L}-V_{H}-lysosomal alpha-glucosidase; (ii) V_{H}-V_{L}-lysosomal alpha-glucosidase; (iii) V_{L}-[(GGGGS)_{3]}-V_{H}-[(GGGGS)_{2]}-lysosomal alpha-glucosidase; or (iv) V_{H}-[(GGGGS)₃]-V_{L}-[(GGGGS)₂]-lysosomal alpha-glucosidase. In some such neonatal cells or populations of neonatal cells, the scFv comprises the sequence set forth in any one of SEQ ID NOS: 540, 549, 551, and 554, optionally wherein the scFv comprises the sequence set forth in SEQ ID NO: 554. In some such neonatal cells or populations of neonatal cells, the scFv consists of the sequence set forth in any one of SEQ ID NOS: 540, 549, 551, and 554, optionally wherein the scFv consists of the sequence set forth in SEQ ID NOS: 554. In some such neonatal cells or populations of neonatal cells, the scFv coding sequence is at least 90%, at least 91%, at least 92%, at least 93%, at least 94%, at least 95%, at least 96%, at least 97%, at least 98%, or at least 99% identical to any one of SEQ ID NOS: 587-599. Optionally, the scFv coding sequence is at least 90%, at least 91%, at least 92%, at least 93%, at least 94%, at least 95%, at least 96%, at least 97%, at least 98%, or at least 99% identical to any one of SEQ ID NOS: 593-595, optionally wherein the scFv coding sequence is at least 90%, at least 91%, at least 92%, at least 93%, at least 94%, at least 95%, at least 96%, at least 97%, at least 98%, or at least 99% identical to SEQ ID NO: 593. Optionally, the scFv coding sequence is at least 90%, at least 91%, at least 92%, at least 93%, at least 94%, at least 95%, at least 96%, at least 97%, at least 98%, or at least 99% identical to any one of SEQ ID NOS: 590-592, optionally wherein the scFv coding sequence is at least 90%, at least 91%, at least 92%, at least 93%, at least 94%, at least 95%, at least 96%, at least 97%, at least 98%, or at least 99% identical to SEQ ID NO: 590. In some such neonatal cells or populations of neonatal cells, the scFv coding sequence is at least 90%, at least 91%, at least 92%, at least 93%, at least 94%, at least 95%, at least 96%, at least 97%, at least 98%, or at least 99% identical to any one of SEQ ID NOS: 587-599 and encodes an scFv comprising any one of SEQ ID NOS: 540, 549, 551, and 554. Optionally, the scFv coding sequence is at least 90%, at least 91%, at least 92%, at least 93%, at least 94%, at least 95%, at least 96%, at least 97%, at least 98%, or at least 99% identical to any one of SEQ ID NOS: 593-595 and encodes an scFv comprising SEQ ID NO: 554, optionally wherein the scFv coding sequence is at least 90%, at least 91%, at least 92%, at least 93%, at least 94%, at least 95%, at least 96%, at least 97%, at least 98%, or at least 99% identical to SEQ ID NO: 593 and encodes an scFv comprising SEQ ID NO: 554. Optionally, the scFv coding sequence is at least 90%, at least 91%, at least 92%, at least 93%, at least 94%, at least 95%, at least 96%, at least 97%, at least 98%, or at least 99% identical to any one of SEQ ID NOS: 590-592 and encodes an scFv comprising SEQ ID NO: 551, optionally wherein the scFv coding sequence is at least 90%, at least 91%, at least 92%, at least 93%, at least 94%, at least 95%, at least 96%, at least 97%, at least 98%, or at least 99% identical to SEQ ID NO: 590 and encodes an scFv comprising SEQ ID NO: 551. In some such neonatal cells or populations of neonatal cells, the scFv coding sequence is at least 90%, at least 91%, at least 92%, at least 93%, at least 94%, at least 95%, at least 96%, at least 97%, at least 98%, or at least 99% identical to any one of SEQ ID NOS: 587-599, is codon-optimized and CpG-depleted, and encodes an scFv comprising any one of SEQ ID NOS: 540, 549, 551, and 554. Optionally, the scFv coding sequence is at least 90%, at least 91%, at least 92%, at least 93%, at least 94%, at least 95%, at least 96%, at least 97%, at least 98%, or at least 99% identical to any one of SEQ ID NOS: 593-595, is codon-optimized and CpG-depleted, and encodes an scFv comprising SEQ ID NO: 554, optionally wherein the scFv coding sequence is at least 90%, at least 91%, at least 92%, at least 93%, at least 94%, at least 95%, at least 96%, at least 97%, at least 98%, or at least 99% identical to SEQ ID NO: 593, the scFv coding sequence is codon-optimized and CpG-depleted, and encodes an scFv comprising SEQ ID NO: 554. Optionally, the scFv coding sequence is at least 90%, at least 91%, at least 92%, at least 93%, at least 94%, at least 95%, at least 96%, at least 97%, at least 98%, or at least 99% identical to any one of SEQ ID NOS: 590-592, is codon-optimized and CpG-depleted, and encodes an scFv comprising SEQ ID NO: 551, optionally wherein the scFv coding sequence is at least 90%, at least 91%, at least 92%, at least 93%, at least 94%, at least 95%, at least 96%, at least 97%, at least 98%, or at least 99% identical to SEQ ID NO: 590, the scFv coding sequence is codon-optimized and CpG-depleted, and encodes an scFv comprising SEQ ID NO: 551. In some such neonatal cells or populations of neonatal cells, the scFv coding sequence comprises the sequence set forth in any one of SEQ ID NOS: 587-599. Optionally, the scFv coding sequence comprises the sequence set forth in any one of SEQ ID NOS: 593-595, optionally wherein the scFv coding sequence comprises the sequence set forth in SEQ ID NO: 593. Optionally, the scFv coding sequence comprises the sequence set forth in any one of SEQ ID NOS: 590-592, optionally wherein the scFv coding sequence comprises the sequence set forth in SEQ ID NO: 590. In some such neonatal cells or populations of neonatal cells, the scFv coding sequence consists of the sequence set forth in any one of SEQ ID NOS: 587-599. Optionally, the scFv coding sequence consists of the sequence set forth in any one of SEQ ID NOS: 593-595, optionally wherein the scFv coding sequence consists of sequence set forth in SEQ ID NO: 593. Optionally, the scFv coding sequence consists of the sequence set forth in any one of SEQ ID NOS: 590-592, optionally wherein the scFv coding sequence consists of sequence set forth in SEQ ID NO: 590.

[0085] In some such neonatal cells or populations of neonatal cells, the lysosomal alpha-glucosidase lacks the lysosomal alpha-glucosidase signal peptide and propeptide. In some such neonatal cells or populations of neonatal cells, the lysosomal alpha-glucosidase comprises the sequence set forth in SEQ ID NO: 173. In some such neonatal cells or populations of neonatal cells, the lysosomal alpha-glucosidase consists of the sequence set forth in SEQ ID NO: 173. In some such neonatal cells or populations of neonatal cells, the lysosomal alpha-glucosidase coding sequence is codon-optimized or CpG-depleted. In some such neonatal cells or populations of neonatal cells, the lysosomal alpha-glucosidase coding sequence is codon-optimized and CpG-depleted. In some such neonatal cells or populations of neonatal cells, the lysosomal alpha-glucosidase coding sequence is at least 90%, at least 91%, at least 92%, at least 93%, at least 94%, at least 95%, at least 96%, at least 97%, at least 98%, or at least 99% identical to any one of SEQ ID NOS: 174-182 and 205-212, optionally wherein the lysosomal alpha-glucosidase coding sequence is at least 90%, at least 91%, at least 92%, at least 93%, at least 94%, at least 95%, at least 96%, at least 97%, at least 98%, or at least 99% identical to SEQ ID NO: 176. In some such neonatal cells or populations of neonatal cells, the lysosomal alpha-glucosidase coding sequence is at least 90%, at least 91%, at least 92%, at least 93%, at least 94%, at least 95%, at least 96%, at least 97%, at least 98%, or at least 99% identical to any one of SEQ ID NOS: 174-182 and 205-212 and encodes a lysosomal alpha-glucosidase protein comprising SEQ ID NO: 173, optionally wherein the lysosomal alpha-glucosidase coding sequence is at least 90%, at least 91%, at least 92%, at least 93%, at least 94%, at least 95%, at least 96%, at least 97%, at least 98%, or at least 99% identical to SEQ ID NO: 176 and encodes a lysosomal alpha-glucosidase protein comprising SEQ ID NO: 173. In some such neonatal cells or populations of neonatal cells, the lysosomal alpha-glucosidase coding sequence is at least 90%, at least 91%, at least 92%, at least 93%, at least 94%, at least 95%, at least 96%, at least 97%, at least 98%, or at least 99% identical to any one of SEQ ID NOS: 174-182 and 205-212, is codon-optimized and CpG-depleted, and encodes a lysosomal alpha-glucosidase protein comprising SEQ ID NO: 173, optionally wherein the lysosomal alpha-glucosidase coding sequence is at least 90%, at least 91%, at least 92%, at least 93%, at least 94%, at least 95%, at least 96%, at least 97%, at least 98%, or at least 99% identical to SEQ ID NO: 176, is codon-optimized and CpG-depleted, and encodes a lysosomal alpha-glucosidase protein comprising SEQ ID NO: 173. In some such neonatal cells or populations of neonatal cells, the lysosomal alpha-glucosidase coding sequence comprises the sequence set forth in any one of SEQ ID NOS: 174-182 and 205-212, optionally wherein the lysosomal alpha-glucosidase coding sequence comprises the sequence set forth in SEQ ID NO: 176. In some such neonatal cells or populations of neonatal cells, the lysosomal alpha-glucosidase coding sequence consists of the sequence set forth in any one of SEQ ID NOS: 174-182 and 205-212, optionally wherein the lysosomal alpha-glucosidase coding sequence consists of the sequence set forth in SEQ ID NO: 176.

[0086] In some such neonatal cells or populations of neonatal cells, the lysosomal alpha-glucosidase lacks the lysosomal alpha-glucosidase signal peptide and propeptide. In some such neonatal cells or populations of neonatal cells, the lysosomal alpha-glucosidase comprises the sequence set forth in SEQ ID NO: 173. In some such neonatal cells or populations of neonatal cells, the lysosomal alpha-glucosidase consists of the sequence set forth in SEQ ID NO: 173. In some such neonatal cells or populations of neonatal cells, the lysosomal alpha-glucosidase coding sequence is codon-optimized or CpG-depleted. In some such neonatal cells or populations of neonatal cells, the lysosomal alpha-glucosidase coding sequence is codon-optimized and CpG-depleted. In some such neonatal cells or populations of neonatal cells, the lysosomal alpha-glucosidase coding sequence is at least 90%, at least 91%, at least 92%, at least 93%, at least 94%, at least 95%, at least 96%, at least 97%, at least 98%, or at least 99% identical to any one of SEQ ID NOS: 174-182, optionally wherein the lysosomal alpha-glucosidase coding sequence is at least 90%, at least 91%, at least 92%, at least 93%, at least 94%, at least 95%, at least 96%, at least 97%, at least 98%, or at least 99% identical to SEQ ID NO: 176. In some such neonatal cells or populations of neonatal cells, the lysosomal alpha-glucosidase coding sequence is at least 90%, at least 91%, at least 92%, at least 93%, at least 94%, at least 95%, at least 96%, at least 97%, at least 98%, or at least 99% identical to any one of SEQ ID NOS: 174-182 and encodes a lysosomal alpha-glucosidase protein comprising SEQ ID NO: 173, optionally wherein the lysosomal alpha-glucosidase coding sequence is at least 90%, at least 91%, at least 92%, at least 93%, at least 94%, at least 95%, at least 96%, at least 97%, at least 98%, or at least 99% identical to SEQ ID NO: 176 and encodes a lysosomal alpha-glucosidase protein comprising SEQ ID NO: 173. In some such neonatal cells or populations of neonatal cells, the lysosomal alpha-glucosidase coding sequence is at least 90%, at least 91%, at least 92%, at least 93%, at least 94%, at least 95%, at least 96%, at least 97%, at least 98%, or at least 99% identical to any one of SEQ ID NOS: 174-182, is codon-optimized and CpG-depleted, and encodes a lysosomal alpha-glucosidase protein comprising SEQ ID NO: 173, optionally wherein the lysosomal alpha-glucosidase coding sequence is at least 90%, at least 91%, at least 92%, at least 93%, at least 94%, at least 95%, at least 96%, at least 97%, at least 98%, or at least 99% identical to SEQ ID NO: 176, is codon-optimized and CpG-depleted, and encodes a lysosomal alpha-glucosidase protein comprising SEQ ID NO: 173. In some such neonatal cells or populations of neonatal cells, the lysosomal alpha-glucosidase coding sequence comprises the sequence set forth in any one of SEQ ID NOS: 174-182, optionally wherein the lysosomal alpha-glucosidase coding sequence comprises the sequence set forth in SEQ ID NO: 176. In some such neonatal cells or populations of neonatal cells, the lysosomal alpha-glucosidase coding sequence consists of the sequence set forth in any one of SEQ ID NOS: 174-182, optionally wherein the lysosomal alpha-glucosidase coding sequence consists of the sequence set forth in SEQ ID NO: 176.

[0087] In some such neonatal cells or populations of neonatal cells, the coding sequence for the multidomain therapeutic protein is codon-optimized or CpG-depleted. In some such neonatal cells or populations of neonatal cells, the coding sequence for the multidomain therapeutic protein is codon-optimized and CpG-depleted. In some such neonatal cells or populations of neonatal cells, the multidomain therapeutic protein comprises the sequence set forth in any one of SEQ ID NOS: 570-573, optionally wherein the multidomain therapeutic protein comprises the sequence set forth in SEQ ID NO: 573. In some such neonatal cells or populations of neonatal cells, the multidomain therapeutic protein consists of the sequence set forth in any one of SEQ ID NOS: 570-573, optionally wherein the multidomain therapeutic protein consists of the sequence set forth in SEQ ID NO: 573. In some such neonatal cells or populations of neonatal cells, the coding sequence for the multidomain therapeutic protein is at least 90%, at least 91%, at least 92%, at least 93%, at least 94%, at least 95%, at least 96%, at least 97%, at least 98%, or at least 99% identical to any one of SEQ ID NOS: 574-586. Optionally, the coding sequence for the multidomain therapeutic protein is at least 90%, at least 91%, at least 92%, at least 93%, at least 94%, at least 95%, at least 96%, at least 97%, at least 98%, or at least 99% identical to any one of SEQ ID NOS: 584-586, optionally wherein the coding sequence for the multidomain therapeutic protein is at least 90%, at least 91%, at least 92%, at least 93%, at least 94%, at least 95%, at least 96%, at least 97%, at least 98%, or at least 99% identical to SEQ ID NO: 584, optionally wherein the nucleic acid construct comprises a sequence at least 90%, at least 91%, at least 92%, at least 93%, at least 94%, at least 95%, at least 96%, at least 97%, at least 98%, or at least 99% identical to SEQ ID NO: 733. Optionally, the coding sequence for the multidomain therapeutic protein is at least 90%, at least 91%, at least 92%, at least 93%, at least 94%, at least 95%, at least 96%, at least 97%, at least 98%, or at least 99% identical to any one of SEQ ID NOS: 581-583, optionally wherein the coding sequence for the multidomain therapeutic protein is at least 90%, at least 91%, at least 92%, at least 93%, at least 94%, at least 95%, at least 96%, at least 97%, at least 98%, or at least 99% identical to SEQ ID NO: 581, optionally wherein the nucleic acid construct comprises a sequence at least 90%, at least 91%, at least 92%, at least 93%, at least 94%, at least 95%, at least 96%, at least 97%, at least 98%, or at least 99% identical to SEQ ID NO: 729. In some such neonatal cells or populations of neonatal cells, the coding sequence for the multidomain therapeutic protein is at least 90%, at least 91%, at least 92%, at least 93%, at least 94%, at least 95%, at least 96%, at least 97%, at least 98%, or at least 99% identical to any one of SEQ ID NOS: 574-586, and the multidomain therapeutic protein comprises the sequence set forth in any one of SEQ ID NOS: 570-573. Optionally, the coding sequence for the multidomain therapeutic protein is at least 90%, at least 91%, at least 92%, at least 93%, at least 94%, at least 95%, at least 96%, at least 97%, at least 98%, or at least 99% identical to any one of SEQ ID NOS: 584-586, and the multidomain therapeutic protein comprises the sequence set forth in SEQ ID NO: 573, optionally wherein the coding sequence for the multidomain therapeutic protein is at least 90%, at least 91%, at least 92%, at least 93%, at least 94%, at least 95%, at least 96%, at least 97%, at least 98%, or at least 99% identical to SEQ ID NO: 584, and the multidomain therapeutic protein comprises the sequence set forth in SEQ ID NO: 573, optionally wherein the nucleic acid construct comprises a sequence at least 90%, at least 91%, at least 92%, at least 93%, at least 94%, at least 95%, at least 96%, at least 97%, at least 98%, or at least 99% identical to SEQ ID NO: 733, and the multidomain therapeutic protein comprises the sequence set forth in SEQ ID NO: 573. Optionally, the coding sequence for the multidomain therapeutic protein is at least 90%, at least 91%, at least 92%, at least 93%, at least 94%, at least 95%, at least 96%, at least 97%, at least 98%, or at least 99% identical to any one of SEQ ID NOS: 581-583, and the multidomain therapeutic protein comprises the sequence set forth in SEQ ID NO: 572, optionally wherein the coding sequence for the multidomain therapeutic protein is at least 90%, at least 91%, at least 92%, at least 93%, at least 94%, at least 95%, at least 96%, at least 97%, at least 98%, or at least 99% identical to SEQ ID NO: 581, and the multidomain therapeutic protein comprises the sequence set forth in SEQ ID NO: 572, optionally wherein the nucleic acid construct comprises a sequence at least 90%, at least 91%, at least 92%, at least 93%, at least 94%, at least 95%, at least 96%, at least 97%, at least 98%, or at least 99% identical to SEQ ID NO: 729, and the multidomain therapeutic protein comprises the sequence set forth in SEQ ID NO: 572. In some such neonatal cells or populations of neonatal cells, the coding sequence for the multidomain therapeutic protein is at least 90%, at least 91%, at least 92%, at least 93%, at least 94%, at least 95%, at least 96%, at least 97%, at least 98%, or at least 99% identical to any one of SEQ ID NOS: 574-586 and is codon-optimized and CpG-depleted, and the multidomain therapeutic protein comprises the sequence set forth in any one of SEQ ID NOS: 570-573. Optionally, the coding sequence for the multidomain therapeutic protein is at least 90%, at least 91%, at least 92%, at least 93%, at least 94%, at least 95%, at least 96%, at least 97%, at least 98%, or at least 99% identical to any one of SEQ ID NOS: 584-586 and is codon-optimized and CpG-depleted, and the multidomain therapeutic protein comprises the sequence set forth in SEQ ID NO: 573, optionally wherein the coding sequence for the multidomain therapeutic protein is at least 90%, at least 91%, at least 92%, at least 93%, at least 94%, at least 95%, at least 96%, at least 97%, at least 98%, or at least 99% identical to SEQ ID NO: 584, the coding sequence for the multidomain therapeutic protein is codon-optimized and CpG-depleted, and the multidomain therapeutic protein comprises the sequence set forth in SEQ ID NO: 573, optionally wherein the nucleic acid construct comprises a sequence at least 90%, at least 91%, at least 92%, at least 93%, at least 94%, at least 95%, at least 96%, at least 97%, at least 98%, or at least 99% identical to SEQ ID NO: 733, the coding sequence for the multidomain therapeutic protein is codon-optimized and CpG-depleted, and the multidomain therapeutic protein comprises the sequence set forth in SEQ ID NO: 573. Optionally, the coding sequence for the multidomain therapeutic protein is at least 90%, at least 91%, at least 92%, at least 93%, at least 94%, at least 95%, at least 96%, at least 97%, at least 98%, or at least 99% identical to any one of SEQ ID NOS: 581-583 and is codon-optimized and CpG-depleted, and the multidomain therapeutic protein comprises the sequence set forth in SEQ ID NO: 572, optionally wherein the coding sequence for the multidomain therapeutic protein is at least 90%, at least 91%, at least 92%, at least 93%, at least 94%, at least 95%, at least 96%, at least 97%, at least 98%, or at least 99% identical to SEQ ID NO: 581, the coding sequence for the multidomain therapeutic protein is codon-optimized and CpG-depleted, and the multidomain therapeutic protein comprises the sequence set forth in SEQ ID NO: 572, optionally wherein the nucleic acid construct comprises a sequence at least 90%, at least 91%, at least 92%, at least 93%, at least 94%, at least 95%, at least 96%, at least 97%, at least 98%, or at least 99% identical to SEQ ID NO: 729, the coding sequence for the multidomain therapeutic protein is codon-optimized and CpG-depleted, and the multidomain therapeutic protein comprises the sequence set forth in SEQ ID NO: 572. In some such neonatal cells or populations of neonatal cells, the coding sequence for the multidomain therapeutic protein comprises the sequence set forth in any one of SEQ ID NOS: 574-586. Optionally, the coding sequence for the multidomain therapeutic protein comprises the sequence set forth in any one of SEQ ID NOS: 584-586, optionally wherein the coding sequence for the multidomain therapeutic protein comprises the sequence set forth in SEQ ID NO: 584, optionally wherein the nucleic acid construct comprises the sequence set forth in SEQ ID NO: 733. Optionally, the coding sequence for the multidomain therapeutic protein comprises the sequence set forth in any one of SEQ ID NOS: 581-583, optionally wherein the coding sequence for the multidomain therapeutic protein comprises the sequence set forth in SEQ ID NO: 581, optionally wherein the nucleic acid construct comprises the sequence set forth in SEQ ID NO: 729. In some such neonatal cells or populations of neonatal cells, the coding sequence for the multidomain therapeutic protein consists of the sequence set forth in any one of SEQ ID NOS: 574-586. Optionally, the coding sequence for the multidomain therapeutic protein consists of the sequence set forth in any one of SEQ ID NOS: 584-586, optionally wherein the coding sequence for the multidomain therapeutic protein consists of the sequence set forth in SEQ ID NO: 584, optionally wherein the nucleic acid construct comprises the sequence set forth in SEQ ID NO: 733. Optionally, the coding sequence for the multidomain therapeutic protein consists of the sequence set forth in any one of SEQ ID NOS: 581-583, optionally wherein the coding sequence for the multidomain therapeutic protein consists of the sequence set forth in SEQ ID NO: 581, optionally wherein the nucleic acid construct comprises the sequence set forth in SEQ ID NO: 729. In some such neonatal cells or populations of neonatal cells, the nucleic acid construct comprises a splice acceptor upstream of the coding sequence for the multidomain therapeutic protein. In some such neonatal cells or populations of neonatal cells, the nucleic acid construct comprises a polyadenylation signal or sequence downstream of the coding sequence for the multidomain therapeutic protein. In some such neonatal cells or populations of neonatal cells, the nucleic acid construct comprises a splice acceptor upstream of the coding sequence for the multidomain therapeutic protein, and the nucleic acid construct comprises a polyadenylation signal or sequence downstream of the coding sequence for the multidomain therapeutic protein. In some such neonatal cells or populations of neonatal cells, the nucleic acid construct does not comprise a promoter that drives the expression of the multidomain therapeutic protein, and wherein the coding sequence for the multidomain therapeutic protein is operably linked to an endogenous promoter at the target genomic locus. In some such neonatal cells or populations of neonatal cells, the coding sequence for the multidomain therapeutic protein in the nucleic acid construct is operably linked to a promoter, optionally wherein the promoter is a liver-specific promoter. In some such neonatal cells or populations of neonatal cells, the nucleic acid construct comprises from 5′ to 3′: a splice acceptor, the coding sequence for the multidomain therapeutic protein, and a polyadenylation signal or sequence, wherein the lysosomal alpha-glucosidase coding sequence comprises the sequence set forth in any one of SEQ ID NOS: 174-182 and 205-212, optionally wherein the lysosomal alpha-glucosidase coding sequence comprises the sequence set forth in SEQ ID NO: 176, optionally wherein the coding sequence for the multidomain therapeutic protein comprises the sequence set forth in any one of SEQ ID NOS: 574-586, and optionally wherein the coding sequence for the multidomain therapeutic protein comprises the sequence set forth in any one of SEQ ID NOS: 584-586, optionally wherein the coding sequence for the multidomain therapeutic protein comprises the sequence set forth in SEQ ID NO: 584, optionally wherein the nucleic acid construct comprises the sequence set forth in SEQ ID NO: 733, or optionally wherein the coding sequence for the multidomain therapeutic protein comprises the sequence set forth in any one of SEQ ID NOS: 581-583, optionally wherein the coding sequence for the multidomain therapeutic protein comprises the sequence set forth in SEQ ID NO: 581, optionally wherein the nucleic acid construct comprises the sequence set forth in SEQ ID NO: 729, wherein the nucleic acid construct does not comprise a promoter that drives the expression of the multidomain therapeutic protein, and wherein the coding sequence for the multidomain therapeutic protein is operably linked to an endogenous promoter at the target genomic locus. In some such neonatal cells or populations of neonatal cells, the nucleic acid construct comprises from 5′ to 3′: a splice acceptor, the coding sequence for the multidomain therapeutic protein, and a polyadenylation signal or sequence, wherein the lysosomal alpha-glucosidase coding sequence comprises the sequence set forth in any one of SEQ ID NOS: 174-182, optionally wherein the lysosomal alpha-glucosidase coding sequence comprises the sequence set forth in SEQ ID NO: 176, optionally wherein the coding sequence for the multidomain therapeutic protein comprises the sequence set forth in any one of SEQ ID NOS: 574-586, and optionally wherein the coding sequence for the multidomain therapeutic protein comprises the sequence set forth in any one of SEQ ID NOS: 584-586, optionally wherein the coding sequence for the multidomain therapeutic protein comprises the sequence set forth in SEQ ID NO: 584, optionally wherein the nucleic acid construct comprises the sequence set forth in SEQ ID NO: 733, or optionally wherein the coding sequence for the multidomain therapeutic protein comprises the sequence set forth in any one of SEQ ID NOS: 581-583, optionally wherein the coding sequence for the multidomain therapeutic protein comprises the sequence set forth in SEQ ID NO: 581, optionally wherein the nucleic acid construct comprises the sequence set forth in SEQ ID NO: 729, wherein the nucleic acid construct does not comprise a promoter that drives the expression of the multidomain therapeutic protein, and wherein the coding sequence for the multidomain therapeutic protein is operably linked to an endogenous promoter at the target genomic locus.

[0088] In some such neonatal cells or populations of neonatal cells, the target genomic locus is an albumin gene, optionally wherein the albumin gene is a human albumin gene. In some such neonatal cells or populations of neonatal cells, the nuclease target site is in intron 1 of the albumin gene.

[0089] In another aspect, provided are compositions comprising a nucleic acid construct comprising a coding sequence for a multidomain therapeutic protein comprising a TfR-binding delivery domain fused to a lysosomal alpha-glucosidase, wherein the lysosomal alpha-glucosidase coding sequence is CpG-depleted relative to a wild type lysosomal alpha-glucosidase coding sequence. In some such compositions, the TfR-binding delivery domain is fused to the lysosomal alpha-glucosidase protein via a peptide linker. In some such compositions, the lysosomal alpha-glucosidase lacks the lysosomal alpha-glucosidase signal peptide and propeptide. In some such compositions, the lysosomal alpha-glucosidase comprises the sequence set forth in SEQ ID NO: 173. In some such compositions, the lysosomal alpha-glucosidase consists of the sequence set forth in SEQ ID NO: 173. In some such compositions, the lysosomal alpha-glucosidase coding sequence is codon-optimized and CpG-depleted. In some such compositions, the lysosomal alpha-glucosidase coding sequence is at least 90%, at least 91%, at least 92%, at least 93%, at least 94%, at least 95%, at least 96%, at least 97%, at least 98%, or at least 99% identical to any one of SEQ ID NOS: 174-182 and 205-212, optionally wherein the lysosomal alpha-glucosidase coding sequence is at least 90%, at least 91%, at least 92%, at least 93%, at least 94%, at least 95%, at least 96%, at least 97%, at least 98%, or at least 99% identical to SEQ ID NO: 176. In some such compositions, the lysosomal alpha-glucosidase coding sequence is at least 90%, at least 91%, at least 92%, at least 93%, at least 94%, at least 95%, at least 96%, at least 97%, at least 98%, or at least 99% identical to any one of SEQ ID NOS: 174-182 and 205-212 and encodes a lysosomal alpha-glucosidase protein comprising SEQ ID NO: 173, optionally wherein the lysosomal alpha-glucosidase coding sequence is at least 90%, at least 91%, at least 92%, at least 93%, at least 94%, at least 95%, at least 96%, at least 97%, at least 98%, or at least 99% identical to SEQ ID NO: 176 and encodes a lysosomal alpha-glucosidase protein comprising SEQ ID NO: 173. In some such compositions, the lysosomal alpha-glucosidase coding sequence is at least 90%, at least 91%, at least 92%, at least 93%, at least 94%, at least 95%, at least 96%, at least 97%, at least 98%, or at least 99% identical to any one of SEQ ID NOS: 174-182 and 205-212, is codon-optimized and CpG-depleted, and encodes a lysosomal alpha-glucosidase protein comprising SEQ ID NO: 173, optionally wherein the lysosomal alpha-glucosidase coding sequence is at least 90%, at least 91%, at least 92%, at least 93%, at least 94%, at least 95%, at least 96%, at least 97%, at least 98%, or at least 99% identical to SEQ ID NO: 176, is codon-optimized and CpG-depleted, and encodes a lysosomal alpha-glucosidase protein comprising SEQ ID NO: 173. In some such compositions, the lysosomal alpha-glucosidase coding sequence comprises the sequence set forth in any one of SEQ ID NOS: 174-182 and 205-212, optionally wherein the lysosomal alpha-glucosidase coding sequence comprises the sequence set forth in SEQ ID NO: 176. In some such compositions, the lysosomal alpha-glucosidase coding sequence consists of the sequence set forth in any one of SEQ ID NOS: 174-182 and 205-212, optionally wherein the lysosomal alpha-glucosidase coding sequence consists of the sequence set forth in SEQ ID NO: 176.

[0090] In another aspect, provided are compositions comprising a nucleic acid construct comprising a coding sequence for a multidomain therapeutic protein comprising a TfR-binding delivery domain fused to a lysosomal alpha-glucosidase, wherein the lysosomal alpha-glucosidase coding sequence is CpG-depleted relative to a wild type lysosomal alpha-glucosidase coding sequence. In some such compositions, the TfR-binding delivery domain is fused to the lysosomal alpha-glucosidase protein via a peptide linker. In some such compositions, the lysosomal alpha-glucosidase lacks the lysosomal alpha-glucosidase signal peptide and propeptide. In some such compositions, the lysosomal alpha-glucosidase comprises the sequence set forth in SEQ ID NO: 173. In some such compositions, the lysosomal alpha-glucosidase consists of the sequence set forth in SEQ ID NO: 173. In some such compositions, the lysosomal alpha-glucosidase coding sequence is codon-optimized and CpG-depleted. In some such compositions, the lysosomal alpha-glucosidase coding sequence is at least 90%, at least 91%, at least 92%, at least 93%, at least 94%, at least 95%, at least 96%, at least 97%, at least 98%, or at least 99% identical to any one of SEQ ID NOS: 174-182, optionally wherein the lysosomal alpha-glucosidase coding sequence is at least 90%, at least 91%, at least 92%, at least 93%, at least 94%, at least 95%, at least 96%, at least 97%, at least 98%, or at least 99% identical to SEQ ID NO: 176. In some such compositions, the lysosomal alpha-glucosidase coding sequence is at least 90%, at least 91%, at least 92%, at least 93%, at least 94%, at least 95%, at least 96%, at least 97%, at least 98%, or at least 99% identical to any one of SEQ ID NOS: 174-182 and encodes a lysosomal alpha-glucosidase protein comprising SEQ ID NO: 173, optionally wherein the lysosomal alpha-glucosidase coding sequence is at least 90%, at least 91%, at least 92%, at least 93%, at least 94%, at least 95%, at least 96%, at least 97%, at least 98%, or at least 99% identical to SEQ ID NO: 176 and encodes a lysosomal alpha-glucosidase protein comprising SEQ ID NO: 173. In some such compositions, the lysosomal alpha-glucosidase coding sequence is at least 90%, at least 91%, at least 92%, at least 93%, at least 94%, at least 95%, at least 96%, at least 97%, at least 98%, or at least 99% identical to any one of SEQ ID NOS: 174-182, is codon-optimized and CpG-depleted, and encodes a lysosomal alpha-glucosidase protein comprising SEQ ID NO: 173, optionally wherein the lysosomal alpha-glucosidase coding sequence is at least 90%, at least 91%, at least 92%, at least 93%, at least 94%, at least 95%, at least 96%, at least 97%, at least 98%, or at least 99% identical to SEQ ID NO: 176, is codon-optimized and CpG-depleted, and encodes a lysosomal alpha-glucosidase protein comprising SEQ ID NO: 173. In some such compositions, the lysosomal alpha-glucosidase coding sequence comprises the sequence set forth in any one of SEQ ID NOS: 174-182, optionally wherein the lysosomal alpha-glucosidase coding sequence comprises the sequence set forth in SEQ ID NO: 176. In some such compositions, the lysosomal alpha-glucosidase coding sequence consists of the sequence set forth in any one of SEQ ID NOS: 174-182, optionally wherein the lysosomal alpha-glucosidase coding sequence consists of the sequence set forth in SEQ ID NO: 176.

[0091] In some such compositions, the coding sequence for the TfR-binding delivery domain is codon-optimized or CpG-depleted. In some such compositions, the coding sequence for the TfR-binding delivery domain is codon-optimized and CpG-depleted. In some such compositions, the TfR-binding delivery domain comprises an anti-TfR antigen-binding protein. In some such compositions, the anti-TfR antigen binding protein comprises: (i) a HCVR that comprises the HCDR1, HCDR2 and HCDR3 of a HCVR comprising the amino acid sequence set forth in SEQ ID NO: 217, 227, 237, 247, 257, 267, 277, 287, 297, 307, 317, 327, 337, 347, 357, 367, 377, 387, 397, 407, 417, 427, 437, 447, 457, 467, 477, 487, 497, 507, 517, or 527 (or a variant thereof); and/or (ii) a LCVR that comprises the LCDR1, LCDR2 and LCDR3 of a LCVR comprising the amino acid sequence set forth in SEQ ID NO: 222, 232, 242, 252, 262, 272, 282, 292, 302, 312, 322, 332, 342, 352, 362, 372, 382, 392, 402, 412, 422, 432, 442, 452, 462, 472, 482, 492, 502, 512, 522, or 532 (or a variant thereof). In some such compositions, the anti-TfR antigen binding protein comprises: (1) a HCVR comprising the HCDR1, HCDR2 and HCDR3 of a HCVR that comprises the amino acid sequence set forth in SEQ ID NO: 217 (or a variant thereof); and a LCVR comprising the LCDR1, LCDR2 and LCDR3 of a LCVR that comprises the amino acid sequence set forth in SEQ ID NO: 222 (or a variant thereof); (2) a HCVR comprising the HCDR1, HCDR2 and HCDR3 of a HCVR that comprises the amino acid sequence set forth in SEQ ID NO: 227 (or a variant thereof); and a LCVR comprising the LCDR1, LCDR2 and LCDR3 of a LCVR that comprises the amino acid sequence set forth in SEQ ID NO: 232 (or a variant thereof); (3) a HCVR comprising the HCDR1, HCDR2 and HCDR3 of a HCVR that comprises the amino acid sequence set forth in SEQ ID NO: 237 (or a variant thereof); and a LCVR comprising the LCDR1, LCDR2 and LCDR3 of a LCVR that comprises the amino acid sequence set forth in SEQ ID NO: 242 (or a variant thereof); (4) a HCVR comprising the HCDR1, HCDR2 and HCDR3 of a HCVR that comprises the amino acid sequence set forth in SEQ ID NO: 247 (or a variant thereof); and a LCVR comprising the LCDR1, LCDR2 and LCDR3 of a LCVR that comprises the amino acid sequence set forth in SEQ ID NO: 252 (or a variant thereof); (5) a HCVR comprising the HCDR1, HCDR2 and HCDR3 of a HCVR that comprises the amino acid sequence set forth in SEQ ID NO: 257 (or a variant thereof); and a LCVR comprising the LCDR1, LCDR2 and LCDR3 of a LCVR that comprises the amino acid sequence set forth in SEQ ID NO: 262 (or a variant thereof); (6) a HCVR comprising the HCDR1, HCDR2 and HCDR3 of a HCVR that comprises the amino acid sequence set forth in SEQ ID NO: 267 (or a variant thereof); and a LCVR comprising the LCDR1, LCDR2 and LCDR3 of a LCVR that comprises the amino acid sequence set forth in SEQ ID NO: 272 (or a variant thereof); (7) a HCVR comprising the HCDR1, HCDR2 and HCDR3 of a HCVR that comprises the amino acid sequence set forth in SEQ ID NO: 277 (or a variant thereof); and a LCVR comprising the LCDR1, LCDR2 and LCDR3 of a LCVR that comprises the amino acid sequence set forth in SEQ ID NO: 282 (or a variant thereof); (8) a HCVR comprising the HCDR1, HCDR2 and HCDR3 of a HCVR that comprises the amino acid sequence set forth in SEQ ID NO: 287 (or a variant thereof); and a LCVR comprising the LCDR1, LCDR2 and LCDR3 of a LCVR that comprises the amino acid sequence set forth in SEQ ID NO: 292 (or a variant thereof); (9) a HCVR comprising the HCDR1, HCDR2 and HCDR3 of a HCVR that comprises the amino acid sequence set forth in SEQ ID NO: 297 (or a variant thereof); and a LCVR comprising the LCDR1, LCDR2 and LCDR3 of a LCVR that comprises the amino acid sequence set forth in SEQ ID NO: 302 (or a variant thereof); (10) a HCVR comprising the HCDR1, HCDR2 and HCDR3 of a HCVR that comprises the amino acid sequence set forth in SEQ ID NO: 307 (or a variant thereof); and a LCVR comprising the LCDR1, LCDR2 and LCDR3 of a LCVR that comprises the amino acid sequence set forth in SEQ ID NO: 312 (or a variant thereof); (11) a HCVR comprising the HCDR1, HCDR2 and HCDR3 of a HCVR that comprises the amino acid sequence set forth in SEQ ID NO: 317 (or a variant thereof); and a LCVR comprising the LCDR1, LCDR2 and LCDR3 of a LCVR that comprises the amino acid sequence set forth in SEQ ID NO: 322 (or a variant thereof); (12) a HCVR comprising the HCDR1, HCDR2 and HCDR3 of a HCVR that comprises the amino acid sequence set forth in SEQ ID NO: 327 (or a variant thereof); and a LCVR comprising the LCDR1, LCDR2 and LCDR3 of a LCVR that comprises the amino acid sequence set forth in SEQ ID NO: 332 (or a variant thereof); (13) a HCVR comprising the HCDR1, HCDR2 and HCDR3 of a HCVR that comprises the amino acid sequence set forth in SEQ ID NO: 337 (or a variant thereof); and a LCVR comprising the LCDR1, LCDR2 and LCDR3 of a LCVR that comprises the amino acid sequence set forth in SEQ ID NO: 342 (or a variant thereof); (14) a HCVR comprising the HCDR1, HCDR2 and HCDR3 of a HCVR that comprises the amino acid sequence set forth in SEQ ID NO: 347 (or a variant thereof); and a LCVR comprising the LCDR1, LCDR2 and LCDR3 of a LCVR that comprises the amino acid sequence set forth in SEQ ID NO: 352 (or a variant thereof); (15) a HCVR comprising the HCDR1, HCDR2 and HCDR3 of a HCVR that comprises the amino acid sequence set forth in SEQ ID NO: 357 (or a variant thereof); and a LCVR comprising the LCDR1, LCDR2 and LCDR3 of a LCVR that comprises the amino acid sequence set forth in SEQ ID NO: 362 (or a variant thereof); (16) a HCVR comprising the HCDR1, HCDR2 and HCDR3 of a HCVR that comprises the amino acid sequence set forth in SEQ ID NO: 367 (or a variant thereof); and a LCVR comprising the LCDR1, LCDR2 and LCDR3 of a LCVR that comprises the amino acid sequence set forth in SEQ ID NO: 372 (or a variant thereof); (17) a HCVR comprising the HCDR1, HCDR2 and HCDR3 of a HCVR that comprises the amino acid sequence set forth in SEQ ID NO: 377 (or a variant thereof); and a LCVR comprising the LCDR1, LCDR2 and LCDR3 of a LCVR that comprises the amino acid sequence set forth in SEQ ID NO: 382 (or a variant thereof); (18) a HCVR comprising the HCDR1, HCDR2 and HCDR3 of a HCVR that comprises the amino acid sequence set forth in SEQ ID NO: 387 (or a variant thereof); and a LCVR comprising the LCDR1, LCDR2 and LCDR3 of a LCVR that comprises the amino acid sequence set forth in SEQ ID NO: 392 (or a variant thereof); (19) a HCVR comprising the HCDR1, HCDR2 and HCDR3 of a HCVR that comprises the amino acid sequence set forth in SEQ ID NO: 397 (or a variant thereof); and a LCVR comprising the LCDR1, LCDR2 and LCDR3 of a LCVR that comprises the amino acid sequence set forth in SEQ ID NO: 402 (or a variant thereof); (20) a HCVR comprising the HCDR1, HCDR2 and HCDR3 of a HCVR that comprises the amino acid sequence set forth in SEQ ID NO: 407 (or a variant thereof); and a LCVR comprising the LCDR1, LCDR2 and LCDR3 of a LCVR that comprises the amino acid sequence set forth in SEQ ID NO: 412 (or a variant thereof); (21) a HCVR comprising the HCDR1, HCDR2 and HCDR3 of a HCVR that comprises the amino acid sequence set forth in SEQ ID NO: 417 (or a variant thereof); and a LCVR comprising the LCDR1, LCDR2 and LCDR3 of a LCVR that comprises the amino acid sequence set forth in SEQ ID NO: 422 (or a variant thereof); (22) a HCVR comprising the HCDR1, HCDR2 and HCDR3 of a HCVR that comprises the amino acid sequence set forth in SEQ ID NO: 427 (or a variant thereof); and a LCVR comprising the LCDR1, LCDR2 and LCDR3 of a LCVR that comprises the amino acid sequence set forth in SEQ ID NO: 432 (or a variant thereof); (23) a HCVR comprising the HCDR1, HCDR2 and HCDR3 of a HCVR that comprises the amino acid sequence set forth in SEQ ID NO: 437 (or a variant thereof); and a LCVR comprising the LCDR1, LCDR2 and LCDR3 of a LCVR that comprises the amino acid sequence set forth in SEQ ID NO: 442 (or a variant thereof); (24) a HCVR comprising the HCDR1, HCDR2 and HCDR3 of a HCVR that comprises the amino acid sequence set forth in SEQ ID NO: 447 (or a variant thereof); and a LCVR comprising the LCDR1, LCDR2 and LCDR3 of a LCVR that comprises the amino acid sequence set forth in SEQ ID NO: 452 (or a variant thereof); (25) a HCVR comprising the HCDR1, HCDR2 and HCDR3 of a HCVR that comprises the amino acid sequence set forth in SEQ ID NO: 457 (or a variant thereof); and a LCVR comprising the LCDR1, LCDR2 and LCDR3 of a LCVR that comprises the amino acid sequence set forth in SEQ ID NO: 462 (or a variant thereof); (26) a HCVR comprising the HCDR1, HCDR2 and HCDR3 of a HCVR that comprises the amino acid sequence set forth in SEQ ID NO: 467 (or a variant thereof); and a LCVR comprising the LCDR1, LCDR2 and LCDR3 of a LCVR that comprises the amino acid sequence set forth in SEQ ID NO: 472 (or a variant thereof); (27) a HCVR comprising the HCDR1, HCDR2 and HCDR3 of a HCVR that comprises the amino acid sequence set forth in SEQ ID NO: 477 (or a variant thereof); and a LCVR comprising the LCDR1, LCDR2 and LCDR3 of a LCVR that comprises the amino acid sequence set forth in SEQ ID NO: 482 (or a variant thereof); (28) a HCVR comprising the HCDR1, HCDR2 and HCDR3 of a HCVR that comprises the amino acid sequence set forth in SEQ ID NO: 487 (or a variant thereof); and a LCVR comprising the LCDR1, LCDR2 and LCDR3 of a LCVR that comprises the amino acid sequence set forth in SEQ ID NO: 492 (or a variant thereof); (29) a HCVR comprising the HCDR1, HCDR2 and HCDR3 of a HCVR that comprises the amino acid sequence set forth in SEQ ID NO: 497 (or a variant thereof); and a LCVR comprising the LCDR1, LCDR2 and LCDR3 of a LCVR that comprises the amino acid sequence set forth in SEQ ID NO: 502 (or a variant thereof); (30) a HCVR comprising the HCDR1, HCDR2 and HCDR3 of a HCVR that comprises the amino acid sequence set forth in SEQ ID NO: 507 (or a variant thereof); and a LCVR comprising the LCDR1, LCDR2 and LCDR3 of a LCVR that comprises the amino acid sequence set forth in SEQ ID NO: 512 (or a variant thereof); (31) a HCVR comprising the HCDR1, HCDR2 and HCDR3 of a HCVR that comprises the amino acid sequence set forth in SEQ ID NO: 517 (or a variant thereof); and a LCVR comprising the LCDR1, LCDR2 and LCDR3 of a LCVR that comprises the amino acid sequence set forth in SEQ ID NO: 522 (or a variant thereof); or (32) a HCVR comprising the HCDR1, HCDR2 and HCDR3 of a HCVR that comprises the amino acid sequence set forth in SEQ ID NO: 527 (or a variant thereof); and a LCVR comprising the LCDR1, LCDR2 and LCDR3 of a LCVR that comprises the amino acid sequence set forth in SEQ ID NO: 532 (or a variant thereof). In some such compositions, the anti-TfR antigen binding protein comprises: (1) a HCVR comprising the HCDR1, HCDR2 and HCDR3 of a HCVR that comprises the amino acid sequence set forth in SEQ ID NO: 437 (or a variant thereof); and a LCVR comprising the LCDR1, LCDR2 and LCDR3 of a LCVR that comprises the amino acid sequence set forth in SEQ ID NO: 442 (or a variant thereof); or (2) a HCVR comprising the HCDR1, HCDR2 and HCDR3 of a HCVR that comprises the amino acid sequence set forth in SEQ ID NO: 457 (or a variant thereof); and a LCVR comprising the LCDR1, LCDR2 and LCDR3 of a LCVR that comprises the amino acid sequence set forth in SEQ ID NO: 462 (or a variant thereof). In some such compositions, the anti-TfR antigen binding protein comprises: (a) a HCVR that comprises: an HCDR1 comprising the amino acid sequence set forth in SEQ ID NO: 218 (or a variant thereof), an HCDR2 comprising the amino acid sequence set forth in SEQ ID NO: 219 (or a variant thereof), and an HCDR3 comprising the amino acid sequence set forth in SEQ ID NO: 220 (or a variant thereof); and a LCVR that comprises: an LCDR1 comprising the amino acid sequence set forth in SEQ ID NO: 223 (or a variant thereof), an LCDR2 comprising the amino acid sequence set forth in SEQ ID NO: 224 (or a variant thereof), and an LCDR3 comprising the amino acid sequence set forth in SEQ ID NO: 225 (or a variant thereof); (b) a HCVR that comprises: an HCDR1 comprising the amino acid sequence set forth in SEQ ID NO: 228 (or a variant thereof), an HCDR2 comprising the amino acid sequence set forth in SEQ ID NO: 229 (or a variant thereof), and an HCDR3 comprising the amino acid sequence set forth in SEQ ID NO: 230 (or a variant thereof); and a LCVR that comprises: an LCDR1 comprising the amino acid sequence set forth in SEQ ID NO: 233 (or a variant thereof), an LCDR2 comprising the amino acid sequence set forth in SEQ ID NO: 234 (or a variant thereof), and an LCDR3 comprising the amino acid sequence set forth in SEQ ID NO: 235 (or a variant thereof); (c) a HCVR that comprises: an HCDR1 comprising the amino acid sequence set forth in SEQ ID NO: 238 (or a variant thereof), an HCDR2 comprising the amino acid sequence set forth in SEQ ID NO: 239 (or a variant thereof), and an HCDR3 comprising the amino acid sequence set forth in SEQ ID NO: 240 (or a variant thereof); and a LCVR that comprises: an LCDR1 comprising the amino acid sequence set forth in SEQ ID NO: 243 (or a variant thereof), an LCDR2 comprising the amino acid sequence set forth in SEQ ID NO: 244 (or a variant thereof), and an LCDR3 comprising the amino acid sequence set forth in SEQ ID NO: 245 (or a variant thereof); (d) a HCVR that comprises: an HCDR1 comprising the amino acid sequence set forth in SEQ ID NO: 248 (or a variant thereof), an HCDR2 comprising the amino acid sequence set forth in SEQ ID NO: 249 (or a variant thereof), and an HCDR3 comprising the amino acid sequence set forth in SEQ ID NO: 250 (or a variant thereof); and a LCVR that comprises: an LCDR1 comprising the amino acid sequence set forth in SEQ ID NO: 253 (or a variant thereof), an LCDR2 comprising the amino acid sequence set forth in SEQ ID NO: 254 (or a variant thereof), and an LCDR3 comprising the amino acid sequence set forth in SEQ ID NO: 255 (or a variant thereof); (e) a HCVR that comprises: an HCDR1 comprising the amino acid sequence set forth in SEQ ID NO: 258 (or a variant thereof), an HCDR2 comprising the amino acid sequence set forth in SEQ ID NO: 259 (or a variant thereof), and an HCDR3 comprising the amino acid sequence set forth in SEQ ID NO: 260 (or a variant thereof); and a LCVR that comprises: an LCDR1 comprising the amino acid sequence set forth in SEQ ID NO: 263 (or a variant thereof), an LCDR2 comprising the amino acid sequence set forth in SEQ ID NO: 264 (or a variant thereof), and an LCDR3 comprising the amino acid sequence set forth in SEQ ID NO: 265 (or a variant thereof); (f) a HCVR that comprises: an HCDR1 comprising the amino acid sequence set forth in SEQ ID NO: 268 (or a variant thereof), an HCDR2 comprising the amino acid sequence set forth in SEQ ID NO: 269 (or a variant thereof), and an HCDR3 comprising the amino acid sequence set forth in SEQ ID NO: 270 (or a variant thereof); and a LCVR that comprises: an LCDR1 comprising the amino acid sequence set forth in SEQ ID NO: 273 (or a variant thereof), an LCDR2 comprising the amino acid sequence set forth in SEQ ID NO: 274 (or a variant thereof), and an LCDR3 comprising the amino acid sequence set forth in SEQ ID NO: 275 (or a variant thereof); (g) a HCVR that comprises: an HCDR1 comprising the amino acid sequence set forth in SEQ ID NO: 278 (or a variant thereof), an HCDR2 comprising the amino acid sequence set forth in SEQ ID NO: 279 (or a variant thereof), and an HCDR3 comprising the amino acid sequence set forth in SEQ ID NO: 280 (or a variant thereof); and a LCVR that comprises: an LCDR1 comprising the amino acid sequence set forth in SEQ ID NO: 283 (or a variant thereof), an LCDR2 comprising the amino acid sequence set forth in SEQ ID NO: 284 (or a variant thereof), and an LCDR3 comprising the amino acid sequence set forth in SEQ ID NO: 285 (or a variant thereof); (h) a HCVR that comprises: an HCDR1 comprising the amino acid sequence set forth in SEQ ID NO: 288 (or a variant thereof), an HCDR2 comprising the amino acid sequence set forth in SEQ ID NO: 289 (or a variant thereof), and an HCDR3 comprising the amino acid sequence set forth in SEQ ID NO: 290 (or a variant thereof); and a LCVR that comprises: an LCDR1 comprising the amino acid sequence set forth in SEQ ID NO: 293 (or a variant thereof), an LCDR2 comprising the amino acid sequence set forth in SEQ ID NO: 294 (or a variant thereof), and an LCDR3 comprising the amino acid sequence set forth in SEQ ID NO: 295 (or a variant thereof); (i) a HCVR that comprises: an HCDR1 comprising the amino acid sequence set forth in SEQ ID NO: 298 (or a variant thereof), an HCDR2 comprising the amino acid sequence set forth in SEQ ID NO: 299 (or a variant thereof), and an HCDR3 comprising the amino acid sequence set forth in SEQ ID NO: 300 (or a variant thereof); and a LCVR that comprises: an LCDR1 comprising the amino acid sequence set forth in SEQ ID NO: 303 (or a variant thereof), an LCDR2 comprising the amino acid sequence set forth in SEQ ID NO: 304 (or a variant thereof), and an LCDR3 comprising the amino acid sequence set forth in SEQ ID NO: 305 (or a variant thereof); (j) a HCVR that comprises: an HCDR1 comprising the amino acid sequence set forth in SEQ ID NO: 308 (or a variant thereof), an HCDR2 comprising the amino acid sequence set forth in SEQ ID NO: 309 (or a variant thereof), and an HCDR3 comprising the amino acid sequence set forth in SEQ ID NO: 310 (or a variant thereof); and a LCVR that comprises: an LCDR1 comprising the amino acid sequence set forth in SEQ ID NO: 313 (or a variant thereof), an LCDR2 comprising the amino acid sequence set forth in SEQ ID NO: 314 (or a variant thereof), and an LCDR3 comprising the amino acid sequence set forth in SEQ ID NO: 315 (or a variant thereof); (k) a HCVR that comprises: an HCDR1 comprising the amino acid sequence set forth in SEQ ID NO: 318 (or a variant thereof), an HCDR2 comprising the amino acid sequence set forth in SEQ ID NO: 319 (or a variant thereof), and an HCDR3 comprising the amino acid sequence set forth in SEQ ID NO: 320 (or a variant thereof); and a LCVR that comprises: an LCDR1 comprising the amino acid sequence set forth in SEQ ID NO: 323 (or a variant thereof), an LCDR2 comprising the amino acid sequence set forth in SEQ ID NO: 324 (or a variant thereof), and an LCDR3 comprising the amino acid sequence set forth in SEQ ID NO: 325 (or a variant thereof); (1) a HCVR that comprises: an HCDR1 comprising the amino acid sequence set forth in SEQ ID NO: 328 (or a variant thereof), an HCDR2 comprising the amino acid sequence set forth in SEQ ID NO: 329 (or a variant thereof), and an HCDR3 comprising the amino acid sequence set forth in SEQ ID NO: 330 (or a variant thereof); and a LCVR that comprises: an LCDR1 comprising the amino acid sequence set forth in SEQ ID NO: 333 (or a variant thereof), an LCDR2 comprising the amino acid sequence set forth in SEQ ID NO: 334 (or a variant thereof), and an LCDR3 comprising the amino acid sequence set forth in SEQ ID NO: 335 (or a variant thereof); (m) a HCVR that comprises: an HCDR1 comprising the amino acid sequence set forth in SEQ ID NO: 338 (or a variant thereof), an HCDR2 comprising the amino acid sequence set forth in SEQ ID NO: 339 (or a variant thereof), and an HCDR3 comprising the amino acid sequence set forth in SEQ ID NO: 340 (or a variant thereof); and a LCVR that comprises: an LCDR1 comprising the amino acid sequence set forth in SEQ ID NO: 343 (or a variant thereof), an LCDR2 comprising the amino acid sequence set forth in SEQ ID NO: 344 (or a variant thereof), and an LCDR3 comprising the amino acid sequence set forth in SEQ ID NO: 345 (or a variant thereof); (n) a HCVR that comprises: an HCDR1 comprising the amino acid sequence set forth in SEQ ID NO: 348 (or a variant thereof), an HCDR2 comprising the amino acid sequence set forth in SEQ ID NO: 349 (or a variant thereof), and an HCDR3 comprising the amino acid sequence set forth in SEQ ID NO: 350 (or a variant thereof); and a LCVR that comprises: an LCDR1 comprising the amino acid sequence set forth in SEQ ID NO: 353 (or a variant thereof), an LCDR2 comprising the amino acid sequence set forth in SEQ ID NO: 354 (or a variant thereof), and an LCDR3 comprising the amino acid sequence set forth in SEQ ID NO: 355 (or a variant thereof); (o) a HCVR that comprises: an HCDR1 comprising the amino acid sequence set forth in SEQ ID NO: 358 (or a variant thereof), an HCDR2 comprising the amino acid sequence set forth in SEQ ID NO: 359 (or a variant thereof), and an HCDR3 comprising the amino acid sequence set forth in SEQ ID NO: 360 (or a variant thereof); and a LCVR that comprises: an LCDR1 comprising the amino acid sequence set forth in SEQ ID NO: 363 (or a variant thereof), an LCDR2 comprising the amino acid sequence set forth in SEQ ID NO: 364 (or a variant thereof), and an LCDR3 comprising the amino acid sequence set forth in SEQ ID NO: 365 (or a variant thereof); (p) a HCVR that comprises: an HCDR1 comprising the amino acid sequence set forth in SEQ ID NO: 368 (or a variant thereof), an HCDR2 comprising the amino acid sequence set forth in SEQ ID NO: 369 (or a variant thereof), and an HCDR3 comprising the amino acid sequence set forth in SEQ ID NO: 370 (or a variant thereof); and a LCVR that comprises: an LCDR1 comprising the amino acid sequence set forth in SEQ ID NO: 373 (or a variant thereof), an LCDR2 comprising the amino acid sequence set forth in SEQ ID NO: 374 (or a variant thereof), and an LCDR3 comprising the amino acid sequence set forth in SEQ ID NO: 375 (or a variant thereof); (q) a HCVR that comprises: an HCDR1 comprising the amino acid sequence set forth in SEQ ID NO: 378 (or a variant thereof), an HCDR2 comprising the amino acid sequence set forth in SEQ ID NO: 379 (or a variant thereof), and an HCDR3 comprising the amino acid sequence set forth in SEQ ID NO: 380 (or a variant thereof); and a LCVR that comprises: an LCDR1 comprising the amino acid sequence set forth in SEQ ID NO: 383 (or a variant thereof), an LCDR2 comprising the amino acid sequence set forth in SEQ ID NO: 384 (or a variant thereof), and an LCDR3 comprising the amino acid sequence set forth in SEQ ID NO: 385 (or a variant thereof); (r) a HCVR that comprises: an HCDR1 comprising the amino acid sequence set forth in SEQ ID NO: 388 (or a variant thereof), an HCDR2 comprising the amino acid sequence set forth in SEQ ID NO: 389 (or a variant thereof), and an HCDR3 comprising the amino acid sequence set forth in SEQ ID NO: 390 (or a variant thereof); and a LCVR that comprises: an LCDR1 comprising the amino acid sequence set forth in SEQ ID NO: 393 (or a variant thereof), an LCDR2 comprising the amino acid sequence set forth in SEQ ID NO: 394 (or a variant thereof), and an LCDR3 comprising the amino acid sequence set forth in SEQ ID NO: 395 (or a variant thereof); (s) a HCVR that comprises: an HCDR1 comprising the amino acid sequence set forth in SEQ ID NO: 398 (or a variant thereof), an HCDR2 comprising the amino acid sequence set forth in SEQ ID NO: 399 (or a variant thereof), and an HCDR3 comprising the amino acid sequence set forth in SEQ ID NO: 400 (or a variant thereof); and a LCVR that comprises: an LCDR1 comprising the amino acid sequence set forth in SEQ ID NO: 403 (or a variant thereof), an LCDR2 comprising the amino acid sequence set forth in SEQ ID NO: 404 (or a variant thereof), and an LCDR3 comprising the amino acid sequence set forth in SEQ ID NO: 405 (or a variant thereof); (t) a HCVR that comprises: an HCDR1 comprising the amino acid sequence set forth in SEQ ID NO: 408 (or a variant thereof), an HCDR2 comprising the amino acid sequence set forth in SEQ ID NO: 409 (or a variant thereof), and an HCDR3 comprising the amino acid sequence set forth in SEQ ID NO: 410 (or a variant thereof); and a LCVR that comprises: an LCDR1 comprising the amino acid sequence set forth in SEQ ID NO: 413 (or a variant thereof), an LCDR2 comprising the amino acid sequence set forth in SEQ ID NO: 414 (or a variant thereof), and an LCDR3 comprising the amino acid sequence set forth in SEQ ID NO: 415 (or a variant thereof); (u) a HCVR that comprises: an HCDR1 comprising the amino acid sequence set forth in SEQ ID NO: 418 (or a variant thereof), an HCDR2 comprising the amino acid sequence set forth in SEQ ID NO: 419 (or a variant thereof), and an HCDR3 comprising the amino acid sequence set forth in SEQ ID NO: 420 (or a variant thereof); and a LCVR that comprises: an LCDR1 comprising the amino acid sequence set forth in SEQ ID NO: 423 (or a variant thereof), an LCDR2 comprising the amino acid sequence set forth in SEQ ID NO: 424 (or a variant thereof), and an LCDR3 comprising the amino acid sequence set forth in SEQ ID NO: 425 (or a variant thereof); (v) a HCVR that comprises: an HCDR1 comprising the amino acid sequence set forth in SEQ ID NO: 428 (or a variant thereof), an HCDR2 comprising the amino acid sequence set forth in SEQ ID NO: 429 (or a variant thereof), and an HCDR3 comprising the amino acid sequence set forth in SEQ ID NO: 430 (or a variant thereof); and a LCVR that comprises: an LCDR1 comprising the amino acid sequence set forth in SEQ ID NO: 433 (or a variant thereof), an LCDR2 comprising the amino acid sequence set forth in SEQ ID NO: 434 (or a variant thereof), and an LCDR3 comprising the amino acid sequence set forth in SEQ ID NO: 435 (or a variant thereof); (w) a HCVR that comprises: an HCDR1 comprising the amino acid sequence set forth in SEQ ID NO: 438 (or a variant thereof), an HCDR2 comprising the amino acid sequence set forth in SEQ ID NO: 439 (or a variant thereof), and an HCDR3 comprising the amino acid sequence set forth in SEQ ID NO: 440 (or a variant thereof); and a LCVR that comprises: an LCDR1 comprising the amino acid sequence set forth in SEQ ID NO: 443 (or a variant thereof), an LCDR2 comprising the amino acid sequence set forth in SEQ ID NO: 444 (or a variant thereof), and an LCDR3 comprising the amino acid sequence set forth in SEQ ID NO: 445 (or a variant thereof); (x) a HCVR that comprises: an HCDR1 comprising the amino acid sequence set forth in SEQ ID NO: 448 (or a variant thereof), an HCDR2 comprising the amino acid sequence set forth in SEQ ID NO: 449 (or a variant thereof), and an HCDR3 comprising the amino acid sequence set forth in SEQ ID NO: 450 (or a variant thereof); and a LCVR that comprises: an LCDR1 comprising the amino acid sequence set forth in SEQ ID NO: 453 (or a variant thereof), an LCDR2 comprising the amino acid sequence set forth in SEQ ID NO: 454 (or a variant thereof), and an LCDR3 comprising the amino acid sequence set forth in SEQ ID NO: 455 (or a variant thereof); (y) a HCVR that comprises: an HCDR1 comprising the amino acid sequence set forth in SEQ ID NO: 458 (or a variant thereof), an HCDR2 comprising the amino acid sequence set forth in SEQ ID NO: 459 (or a variant thereof), and an HCDR3 comprising the amino acid sequence set forth in SEQ ID NO: 460 (or a variant thereof); and a LCVR that comprises: an LCDR1 comprising the amino acid sequence set forth in SEQ ID NO: 463 (or a variant thereof), an LCDR2 comprising the amino acid sequence set forth in SEQ ID NO: 464 (or a variant thereof), and an LCDR3 comprising the amino acid sequence set forth in SEQ ID NO: 465 (or a variant thereof); (z) a HCVR that comprises: an HCDR1 comprising the amino acid sequence set forth in SEQ ID NO: 468 (or a variant thereof), an HCDR2 comprising the amino acid sequence set forth in SEQ ID NO: 469 (or a variant thereof), and an HCDR3 comprising the amino acid sequence set forth in SEQ ID NO: 470 (or a variant thereof); and a LCVR that comprises: an LCDR1 comprising the amino acid sequence set forth in SEQ ID NO: 473 (or a variant thereof), an LCDR2 comprising the amino acid sequence set forth in SEQ ID NO: 474 (or a variant thereof), and an LCDR3 comprising the amino acid sequence set forth in SEQ ID NO: 475 (or a variant thereof); (aa) a HCVR that comprises: an HCDR1 comprising the amino acid sequence set forth in SEQ ID NO: 478 (or a variant thereof), an HCDR2 comprising the amino acid sequence set forth in SEQ ID NO: 479 (or a variant thereof), and an HCDR3 comprising the amino acid sequence set forth in SEQ ID NO: 480 (or a variant thereof); and a LCVR that comprises: an LCDR1 comprising the amino acid sequence set forth in SEQ ID NO: 483 (or a variant thereof), an LCDR2 comprising the amino acid sequence set forth in SEQ ID NO: 484 (or a variant thereof), and an LCDR3 comprising the amino acid sequence set forth in SEQ ID NO: 485 (or a variant thereof); (ab) a HCVR that comprises: an HCDR1 comprising the amino acid sequence set forth in SEQ ID NO: 488 (or a variant thereof), an HCDR2 comprising the amino acid sequence set forth in SEQ ID NO: 489 (or a variant thereof), and an HCDR3 comprising the amino acid sequence set forth in SEQ ID NO: 490 (or a variant thereof); and a LCVR that comprises: an LCDR1 comprising the amino acid sequence set forth in SEQ ID NO: 493 (or a variant thereof), an LCDR2 comprising the amino acid sequence set forth in SEQ ID NO: 494 (or a variant thereof), and an LCDR3 comprising the amino acid sequence set forth in SEQ ID NO: 495 (or a variant thereof); (ac) a HCVR that comprises: an HCDR1 comprising the amino acid sequence set forth in SEQ ID NO: 498 (or a variant thereof), an HCDR2 comprising the amino acid sequence set forth in SEQ ID NO: 499 (or a variant thereof), and an HCDR3 comprising the amino acid sequence set forth in SEQ ID NO: 500 (or a variant thereof); and a LCVR that comprises: an LCDR1 comprising the amino acid sequence set forth in SEQ ID NO: 503 (or a variant thereof), an LCDR2 comprising the amino acid sequence set forth in SEQ ID NO: 504 (or a variant thereof), and an LCDR3 comprising the amino acid sequence set forth in SEQ ID NO: 505 (or a variant thereof); (ad) a HCVR that comprises: an HCDR1 comprising the amino acid sequence set forth in SEQ ID NO: 508 (or a variant thereof), an HCDR2 comprising the amino acid sequence set forth in SEQ ID NO: 509 (or a variant thereof), and an HCDR3 comprising the amino acid sequence set forth in SEQ ID NO: 510 (or a variant thereof); and a LCVR that comprises: an LCDR1 comprising the amino acid sequence set forth in SEQ ID NO: 513 (or a variant thereof), an LCDR2 comprising the amino acid sequence set forth in SEQ ID NO: 514 (or a variant thereof), and an LCDR3 comprising the amino acid sequence set forth in SEQ ID NO: 515 (or a variant thereof); (ae) a HCVR that comprises: an HCDR1 comprising the amino acid sequence set forth in SEQ ID NO: 518 (or a variant thereof), an HCDR2 comprising the amino acid sequence set forth in SEQ ID NO: 519 (or a variant thereof), and an HCDR3 comprising the amino acid sequence set forth in SEQ ID NO: 520 (or a variant thereof); and a LCVR that comprises: an LCDR1 comprising the amino acid sequence set forth in SEQ ID NO: 523 (or a variant thereof), an LCDR2 comprising the amino acid sequence set forth in SEQ ID NO: 524 (or a variant thereof), and an LCDR3 comprising the amino acid sequence set forth in SEQ ID NO: 525 (or a variant thereof); and/or (af) a HCVR that comprises: an HCDR1 comprising the amino acid sequence set forth in SEQ ID NO: 528 (or a variant thereof), an HCDR2 comprising the amino acid sequence set forth in SEQ ID NO: 529 (or a variant thereof), and an HCDR3 comprising the amino acid sequence set forth in SEQ ID NO: 530 (or a variant thereof); and a LCVR that comprises: an LCDR1 comprising the amino acid sequence set forth in SEQ ID NO: 533 (or a variant thereof), an LCDR2 comprising the amino acid sequence set forth in SEQ ID NO: 534 (or a variant thereof), and an LCDR3 comprising the amino acid sequence set forth in SEQ ID NO: 535 (or a variant thereof). In some such compositions, the anti-TfR antigen binding protein comprises: (a) a HCVR that comprises: an HCDR1 comprising the amino acid sequence set forth in SEQ ID NO: 438 (or a variant thereof), an HCDR2 comprising the amino acid sequence set forth in SEQ ID NO: 439 (or a variant thereof), and an HCDR3 comprising the amino acid sequence set forth in SEQ ID NO: 440 (or a variant thereof); and a LCVR that comprises: an LCDR1 comprising the amino acid sequence set forth in SEQ ID NO: 443 (or a variant thereof), an LCDR2 comprising the amino acid sequence set forth in SEQ ID NO: 444 (or a variant thereof), and an LCDR3 comprising the amino acid sequence set forth in SEQ ID NO: 445 (or a variant thereof); or (b) a HCVR that comprises: an HCDR1 comprising the amino acid sequence set forth in SEQ ID NO: 458 (or a variant thereof), an HCDR2 comprising the amino acid sequence set forth in SEQ ID NO: 459 (or a variant thereof), and an HCDR3 comprising the amino acid sequence set forth in SEQ ID NO: 460 (or a variant thereof); and a LCVR that comprises: an LCDR1 comprising the amino acid sequence set forth in SEQ ID NO: 463 (or a variant thereof), an LCDR2 comprising the amino acid sequence set forth in SEQ ID NO: 464 (or a variant thereof), and an LCDR3 comprising the amino acid sequence set forth in SEQ ID NO: 465 (or a variant thereof). In some such compositions, the anti-TfR antigen binding protein comprises: (i) a HCVR that comprises the amino acid sequence set forth in SEQ ID NO: 217 (or a variant thereof); and a LCVR that comprises the amino acid sequence set forth in SEQ ID NO: 222 (or a variant thereof); (ii) a HCVR that comprises the amino acid sequence set forth in SEQ ID NO: 227 (or a variant thereof); and a LCVR that comprises the amino acid sequence set forth in SEQ ID NO: 232 (or a variant thereof); (iii) a HCVR that comprises the amino acid sequence set forth in SEQ ID NO: 237 (or a variant thereof); and a LCVR that comprises the amino acid sequence set forth in SEQ ID NO: 242 (or a variant thereof); (iv) a HCVR that comprises the amino acid sequence set forth in SEQ ID NO: 247 (or a variant thereof); and a LCVR that comprises the amino acid sequence set forth in SEQ ID NO: 252 (or a variant thereof); (v) a HCVR that comprises the amino acid sequence set forth in SEQ ID NO: 257 (or a variant thereof); and a LCVR that comprises the amino acid sequence set forth in SEQ ID NO: 262 (or a variant thereof); (vi) a HCVR that comprises the amino acid sequence set forth in SEQ ID NO: 267 (or a variant thereof); and a LCVR that comprises the amino acid sequence set forth in SEQ ID NO: 272 (or a variant thereof); (vii) a HCVR that comprises the amino acid sequence set forth in SEQ ID NO: 277 (or a variant thereof); and a LCVR that comprises the amino acid sequence set forth in SEQ ID NO: 282 (or a variant thereof); (viii) a HCVR that comprises the amino acid sequence set forth in SEQ ID NO: 287 (or a variant thereof); and a LCVR that comprises the amino acid sequence set forth in SEQ ID NO: 292 (or a variant thereof); (ix) a HCVR that comprises the amino acid sequence set forth in SEQ ID NO: 297 (or a variant thereof); and a LCVR that comprises the amino acid sequence set forth in SEQ ID NO: 302 (or a variant thereof); (x) a HCVR that comprises the amino acid sequence set forth in SEQ ID NO: 307 (or a variant thereof); and a LCVR that comprises the amino acid sequence set forth in SEQ ID NO: 312 (or a variant thereof); (xi) a HCVR that comprises the amino acid sequence set forth in SEQ ID NO: 317 (or a variant thereof); and a LCVR that comprises the amino acid sequence set forth in SEQ ID NO: 322 (or a variant thereof); (xii) a HCVR that comprises the amino acid sequence set forth in SEQ ID NO: 327 (or a variant thereof); and a LCVR that comprises the amino acid sequence set forth in SEQ ID NO: 332 (or a variant thereof); (xiii) a HCVR that comprises the amino acid sequence set forth in SEQ ID NO: 337 (or a variant thereof); and a LCVR that comprises the amino acid sequence set forth in SEQ ID NO: 342 (or a variant thereof); (xiv) a HCVR that comprises the amino acid sequence set forth in SEQ ID NO: 347 (or a variant thereof); and a LCVR that comprises the amino acid sequence set forth in SEQ ID NO: 352 (or a variant thereof); (xv) a HCVR that comprises the amino acid sequence set forth in SEQ ID NO: 357 (or a variant thereof); and a LCVR that comprises the amino acid sequence set forth in SEQ ID NO: 362 (or a variant thereof); (xvi) a HCVR that comprises the amino acid sequence set forth in SEQ ID NO: 367 (or a variant thereof); and a LCVR that comprises the amino acid sequence set forth in SEQ ID NO: 372 (or a variant thereof); (xvii) a HCVR that comprises the amino acid sequence set forth in SEQ ID NO: 377 (or a variant thereof); and a LCVR that comprises the amino acid sequence set forth in SEQ ID NO: 382 (or a variant thereof); (xviii) a HCVR that comprises the amino acid sequence set forth in SEQ ID NO: 387 (or a variant thereof); and a LCVR that comprises the amino acid sequence set forth in SEQ ID NO: 392 (or a variant thereof); (xix) a HCVR that comprises the amino acid sequence set forth in SEQ ID NO: 397 (or a variant thereof); and a LCVR that comprises the amino acid sequence set forth in SEQ ID NO: 402 (or a variant thereof); (xx) a HCVR that comprises the amino acid sequence set forth in SEQ ID NO: 407 (or a variant thereof); and a LCVR that comprises the amino acid sequence set forth in SEQ ID NO: 412 (or a variant thereof); (xxi) a HCVR that comprises the amino acid sequence set forth in SEQ ID NO: 417 (or a variant thereof); and a LCVR that comprises the amino acid sequence set forth in SEQ ID NO: 422 (or a variant thereof); (xxii) a HCVR that comprises the amino acid sequence set forth in SEQ ID NO: 427 (or a variant thereof); and a LCVR that comprises the amino acid sequence set forth in SEQ ID NO: 432 (or a variant thereof); (xxiii) a HCVR that comprises the amino acid sequence set forth in SEQ ID NO: 437 (or a variant thereof); and a LCVR that comprises the amino acid sequence set forth in SEQ ID NO: 442 (or a variant thereof); (xxiv) a HCVR that comprises the amino acid sequence set forth in SEQ ID NO: 447 (or a variant thereof); and a LCVR that comprises the amino acid sequence set forth in SEQ ID NO: 452 (or a variant thereof); (xxv) a HCVR that comprises the amino acid sequence set forth in SEQ ID NO: 457 (or a variant thereof); and a LCVR that comprises the amino acid sequence set forth in SEQ ID NO: 462 (or a variant thereof); (xxvi) a HCVR that comprises the amino acid sequence set forth in SEQ ID NO: 467 (or a variant thereof); and a LCVR that comprises the amino acid sequence set forth in SEQ ID NO: 472 (or a variant thereof); (xxvii) a HCVR that comprises the amino acid sequence set forth in SEQ ID NO: 477 (or a variant thereof); and a LCVR that comprises the amino acid sequence set forth in SEQ ID NO: 482 (or a variant thereof); (xxviii) a HCVR that comprises the amino acid sequence set forth in SEQ ID NO: 487 (or a variant thereof); and a LCVR that comprises the amino acid sequence set forth in SEQ ID NO: 492 (or a variant thereof); (xxix) a HCVR that comprises the amino acid sequence set forth in SEQ ID NO: 497 (or a variant thereof); and a LCVR that comprises the amino acid sequence set forth in SEQ ID NO: 502 (or a variant thereof); (xxx) a HCVR that comprises the amino acid sequence set forth in SEQ ID NO: 507 (or a variant thereof); and a LCVR that comprises the amino acid sequence set forth in SEQ ID NO: 512 (or a variant thereof); (xxxi) a HCVR that comprises the amino acid sequence set forth in SEQ ID NO: 517 (or a variant thereof); and a LCVR that comprises the amino acid sequence set forth in SEQ ID NO: 522 (or a variant thereof); and/or (xxxii) a HCVR that comprises the amino acid sequence set forth in SEQ ID NO: 527 (or a variant thereof); and a LCVR that comprises the amino acid sequence set forth in SEQ ID NO: 532 (or a variant thereof). In some such compositions, the anti-TfR antigen binding protein comprises: (i) a HCVR that comprises the amino acid sequence set forth in SEQ ID NO: 437 (or a variant thereof); and a LCVR that comprises the amino acid sequence set forth in SEQ ID NO: 442 (or a variant thereof); or (ii) a HCVR that comprises the amino acid sequence set forth in SEQ ID NO: 457 (or a variant thereof); and a LCVR that comprises the amino acid sequence set forth in SEQ ID NO: 462 (or a variant thereof). In some such compositions, the TfR-binding delivery domain comprises an anti-TfR antibody, antibody fragment, or single-chain variable fragment (scFv). In some such compositions, the TfR-binding delivery domain is the single-chain variable fragment (scFv), optionally wherein the multidomain therapeutic protein comprises domains arranged in the following orientation: N′-Heavy chain variable region-Light chain variable region-lysosomal alpha-glucosidase-C′ or N′-Light chain variable region-Heavy chain variable region-lysosomal alpha-glucosidase-C′, optionally wherein the scFv and lysosomal alpha-glucosidase are connected by a peptide linker, and optionally wherein the peptide linker which is -(GGGGS)ₘ-(SEQ ID NO: 600); wherein m is 1, 2, 3, 4, 5, 6, 7, 8, 9, or 10, optionally wherein the scFv variable regions are connected by a peptide linker, and optionally wherein the peptide linker which is -(GGGGS)ₘ- (SEQ ID NO: 600); wherein m is 1, 2, 3, 4, 5, 6, 7, 8, 9, or 10. In some such compositions, the multidomain therapeutic protein comprises a heavy chain variable region (V_{H}) and a light chain variable region (V_{L}), and a lysosomal alpha-glucosidase, wherein the V_{H}, V_{L} and lysosomal alpha-glucosidase are arranged as follows: (i) V_{L}-V_{H}-lysosomal alpha-glucosidase; (ii) V_{H}-V_{L}-lysosomal alpha-glucosidase; (iii) V_{L}-[(GGGGS)₃]-V_{H}-[(GGGGS)₂]-lysosomal alpha-glucosidase; or (iv) V_{H}-[(GGGGS)₃]-V_{L}-[(GGGGS)₂]-lysosomal alpha-glucosidase. In some such compositions, the scFv comprises the sequence set forth in any one of SEQ ID NOS: 540, 549, 551, and 554, optionally wherein the scFv comprises the sequence set forth in SEQ ID NO: 554. In some such compositions, the scFv consists of the sequence set forth in any one of SEQ ID NOS: 540, 549, 551, and 554, optionally wherein the scFv consists of the sequence set forth in SEQ ID NOS: 554. In some such compositions, the scFv coding sequence is at least 90%, at least 91%, at least 92%, at least 93%, at least 94%, at least 95%, at least 96%, at least 97%, at least 98%, or at least 99% identical to any one of SEQ ID NOS: 587-599. Optionally, the scFv coding sequence is at least 90%, at least 91%, at least 92%, at least 93%, at least 94%, at least 95%, at least 96%, at least 97%, at least 98%, or at least 99% identical to any one of SEQ ID NOS: 593-595, optionally wherein the scFv coding sequence is at least 90%, at least 91%, at least 92%, at least 93%, at least 94%, at least 95%, at least 96%, at least 97%, at least 98%, or at least 99% identical to SEQ ID NO: 593. Optionally, the scFv coding sequence is at least 90%, at least 91%, at least 92%, at least 93%, at least 94%, at least 95%, at least 96%, at least 97%, at least 98%, or at least 99% identical to any one of SEQ ID NOS: 590-592, optionally wherein the scFv coding sequence is at least 90%, at least 91%, at least 92%, at least 93%, at least 94%, at least 95%, at least 96%, at least 97%, at least 98%, or at least 99% identical to SEQ ID NO: 590. In some such compositions, the scFv coding sequence is at least 90%, at least 91%, at least 92%, at least 93%, at least 94%, at least 95%, at least 96%, at least 97%, at least 98%, or at least 99% identical to any one of SEQ ID NOS: 587-599 and encodes an scFv comprising any one of SEQ ID NOS: 540, 549, 551, and 554. Optionally, wherein the scFv coding sequence is at least 90%, at least 91%, at least 92%, at least 93%, at least 94%, at least 95%, at least 96%, at least 97%, at least 98%, or at least 99% identical to any one of SEQ ID NOS: 593-595 and encodes an scFv comprising SEQ ID NO: 554, optionally wherein the scFv coding sequence is at least 90%, at least 91%, at least 92%, at least 93%, at least 94%, at least 95%, at least 96%, at least 97%, at least 98%, or at least 99% identical to SEQ ID NO: 593 and encodes an scFv comprising SEQ ID NO: 554. Optionally, wherein the scFv coding sequence is at least 90%, at least 91%, at least 92%, at least 93%, at least 94%, at least 95%, at least 96%, at least 97%, at least 98%, or at least 99% identical to any one of SEQ ID NOS: 590-592 and encodes an scFv comprising SEQ ID NO: 551, optionally wherein the scFv coding sequence is at least 90%, at least 91%, at least 92%, at least 93%, at least 94%, at least 95%, at least 96%, at least 97%, at least 98%, or at least 99% identical to SEQ ID NO: 590 and encodes an scFv comprising SEQ ID NO: 551. In some such compositions, the scFv coding sequence is at least 90%, at least 91%, at least 92%, at least 93%, at least 94%, at least 95%, at least 96%, at least 97%, at least 98%, or at least 99% identical to any one of SEQ ID NOS: 587-599, is codon-optimized and CpG-depleted, and encodes an scFv comprising any one of SEQ ID NOS: 540, 549, 551, and 554. Optionally, the scFv coding sequence is at least 90%, at least 91%, at least 92%, at least 93%, at least 94%, at least 95%, at least 96%, at least 97%, at least 98%, or at least 99% identical to any one of SEQ ID NOS: 593-595, is codon-optimized and CpG-depleted, and encodes an scFv comprising SEQ ID NO: 554, optionally wherein the scFv coding sequence is at least 90%, at least 91%, at least 92%, at least 93%, at least 94%, at least 95%, at least 96%, at least 97%, at least 98%, or at least 99% identical to SEQ ID NO: 593, the scFv coding sequence is codon-optimized and CpG-depleted, and encodes an scFv comprising SEQ ID NO: 554. Optionally, the scFv coding sequence is at least 90%, at least 91%, at least 92%, at least 93%, at least 94%, at least 95%, at least 96%, at least 97%, at least 98%, or at least 99% identical to any one of SEQ ID NOS: 590-592, is codon-optimized and CpG-depleted, and encodes an scFv comprising SEQ ID NO: 551, optionally wherein the scFv coding sequence is at least 90%, at least 91%, at least 92%, at least 93%, at least 94%, at least 95%, at least 96%, at least 97%, at least 98%, or at least 99% identical to SEQ ID NO: 590, the scFv coding sequence is codon-optimized and CpG-depleted, and encodes an scFv comprising SEQ ID NO: 551. In some such compositions, the scFv coding sequence comprises the sequence set forth in any one of SEQ ID NOS: 587-599. Optionally, the scFv coding sequence comprises the sequence set forth in any one of SEQ ID NOS: 593-595, optionally wherein the scFv coding sequence comprises the sequence set forth in SEQ ID NO: 593. Optionally, the scFv coding sequence comprises the sequence set forth in any one of SEQ ID NOS: 590-592, optionally wherein the scFv coding sequence comprises the sequence set forth in SEQ ID NO: 590. In some such compositions, the scFv coding sequence consists of the sequence set forth in any one of SEQ ID NOS: 587-599. Optionally, the scFv coding sequence consists of the sequence set forth in any one of SEQ ID NOS: 593-595, optionally wherein the scFv coding sequence consists of the sequence set forth in SEQ ID NO: 593. Optionally, the scFv coding sequence consists of the sequence set forth in any one of SEQ ID NOS: 590-592, optionally wherein the scFv coding sequence consists of the sequence set forth in SEQ ID NO: 590.

[0092] In some such compositions, the coding sequence for the multidomain therapeutic protein is codon-optimized or CpG-depleted. In some such compositions, the coding sequence for the multidomain therapeutic protein is codon-optimized and CpG-depleted. In some such compositions, the multidomain therapeutic protein comprises the sequence set forth in any one of SEQ ID NOS: 570-573, optionally wherein the multidomain therapeutic protein comprises the sequence set forth in SEQ ID NO: 573. In some such compositions, the multidomain therapeutic protein consists of the sequence set forth in any one of SEQ ID NOS: 570-573, optionally wherein the multidomain therapeutic protein consists of the sequence set forth in SEQ ID NO: 573. In some such compositions, the coding sequence for the multidomain therapeutic protein is at least 90%, at least 91%, at least 92%, at least 93%, at least 94%, at least 95%, at least 96%, at least 97%, at least 98%, or at least 99% identical to any one of SEQ ID NOS: 574-586. Optionally, the coding sequence for the multidomain therapeutic protein is at least 90%, at least 91%, at least 92%, at least 93%, at least 94%, at least 95%, at least 96%, at least 97%, at least 98%, or at least 99% identical to any one of SEQ ID NOS: 584-586, optionally wherein the coding sequence for the multidomain therapeutic protein is at least 90%, at least 91%, at least 92%, at least 93%, at least 94%, at least 95%, at least 96%, at least 97%, at least 98%, or at least 99% identical to SEQ ID NO: 584, optionally wherein the nucleic acid construct comprises a sequence at least 90%, at least 91%, at least 92%, at least 93%, at least 94%, at least 95%, at least 96%, at least 97%, at least 98%, or at least 99% identical to SEQ ID NO: 733. Optionally, the coding sequence for the multidomain therapeutic protein is at least 90%, at least 91%, at least 92%, at least 93%, at least 94%, at least 95%, at least 96%, at least 97%, at least 98%, or at least 99% identical to any one of SEQ ID NOS: 581-583, optionally wherein the coding sequence for the multidomain therapeutic protein is at least 90%, at least 91%, at least 92%, at least 93%, at least 94%, at least 95%, at least 96%, at least 97%, at least 98%, or at least 99% identical to SEQ ID NO: 581, optionally wherein the nucleic acid construct comprises a sequence at least 90%, at least 91%, at least 92%, at least 93%, at least 94%, at least 95%, at least 96%, at least 97%, at least 98%, or at least 99% identical to SEQ ID NO: 729. In some such compositions, the coding sequence for the multidomain therapeutic protein is at least 90%, at least 91%, at least 92%, at least 93%, at least 94%, at least 95%, at least 96%, at least 97%, at least 98%, or at least 99% identical to any one of SEQ ID NOS: 574-586, and the multidomain therapeutic protein comprises the sequence set forth in any one of SEQ ID NOS: 570-573. Optionally, the coding sequence for the multidomain therapeutic protein is at least 90%, at least 91%, at least 92%, at least 93%, at least 94%, at least 95%, at least 96%, at least 97%, at least 98%, or at least 99% identical to any one of SEQ ID NOS: 584-586, and the multidomain therapeutic protein comprises the sequence set forth in SEQ ID NO: 573, optionally wherein the coding sequence for the multidomain therapeutic protein is at least 90%, at least 91%, at least 92%, at least 93%, at least 94%, at least 95%, at least 96%, at least 97%, at least 98%, or at least 99% identical to SEQ ID NO: 584, and the multidomain therapeutic protein comprises the sequence set forth in SEQ ID NO: 573, optionally wherein the nucleic acid construct comprises a sequence at least 90%, at least 91%, at least 92%, at least 93%, at least 94%, at least 95%, at least 96%, at least 97%, at least 98%, or at least 99% identical to SEQ ID NO: 733, and the multidomain therapeutic protein comprises the sequence set forth in SEQ ID NO: 573. Optionally, the coding sequence for the multidomain therapeutic protein is at least 90%, at least 91%, at least 92%, at least 93%, at least 94%, at least 95%, at least 96%, at least 97%, at least 98%, or at least 99% identical to any one of SEQ ID NOS: 581-583, and the multidomain therapeutic protein comprises the sequence set forth in SEQ ID NO: 572, optionally wherein the coding sequence for the multidomain therapeutic protein is at least 90%, at least 91%, at least 92%, at least 93%, at least 94%, at least 95%, at least 96%, at least 97%, at least 98%, or at least 99% identical to SEQ ID NO: 581, and the multidomain therapeutic protein comprises the sequence set forth in SEQ ID NO: 572, optionally wherein the nucleic acid construct comprises a sequence at least 90%, at least 91%, at least 92%, at least 93%, at least 94%, at least 95%, at least 96%, at least 97%, at least 98%, or at least 99% identical to SEQ ID NO: 729, and the multidomain therapeutic protein comprises the sequence set forth in SEQ ID NO: 572. In some such compositions, the coding sequence for the multidomain therapeutic protein is at least 90%, at least 91%, at least 92%, at least 93%, at least 94%, at least 95%, at least 96%, at least 97%, at least 98%, or at least 99% identical to any one of SEQ ID NOS: 574-586 and is codon-optimized and CpG-depleted, and the multidomain therapeutic protein comprises the sequence set forth in any one of SEQ ID NOS: 570-573. Optionally, the coding sequence for the multidomain therapeutic protein is at least 90%, at least 91%, at least 92%, at least 93%, at least 94%, at least 95%, at least 96%, at least 97%, at least 98%, or at least 99% identical to any one of SEQ ID NOS: 584-586 and is codon-optimized and CpG-depleted, and the multidomain therapeutic protein comprises the sequence set forth in SEQ ID NO: 573, optionally wherein the coding sequence for the multidomain therapeutic protein is at least 90%, at least 91%, at least 92%, at least 93%, at least 94%, at least 95%, at least 96%, at least 97%, at least 98%, or at least 99% identical to SEQ ID NO: 584, the coding sequence for the multidomain therapeutic protein is codon-optimized and CpG-depleted, and the multidomain therapeutic protein comprises the sequence set forth in SEQ ID NO: 573, optionally wherein the nucleic acid construct comprises a sequence at least 90%, at least 91%, at least 92%, at least 93%, at least 94%, at least 95%, at least 96%, at least 97%, at least 98%, or at least 99% identical to SEQ ID NO: 733, the coding sequence for the multidomain therapeutic protein is codon-optimized and CpG-depleted, and the multidomain therapeutic protein comprises the sequence set forth in SEQ ID NO: 573. Optionally, the coding sequence for the multidomain therapeutic protein is at least 90%, at least 91%, at least 92%, at least 93%, at least 94%, at least 95%, at least 96%, at least 97%, at least 98%, or at least 99% identical to any one of SEQ ID NOS: 581-583 and is codon-optimized and CpG-depleted, and the multidomain therapeutic protein comprises the sequence set forth in SEQ ID NO: 572, optionally wherein the coding sequence for the multidomain therapeutic protein is at least 90%, at least 91%, at least 92%, at least 93%, at least 94%, at least 95%, at least 96%, at least 97%, at least 98%, or at least 99% identical to SEQ ID NO: 581, the coding sequence for the multidomain therapeutic protein is codon-optimized and CpG-depleted, and the multidomain therapeutic protein comprises the sequence set forth in SEQ ID NO: 572, optionally wherein the nucleic acid construct comprises a sequence at least 90%, at least 91%, at least 92%, at least 93%, at least 94%, at least 95%, at least 96%, at least 97%, at least 98%, or at least 99% identical to SEQ ID NO: 729, the coding sequence for the multidomain therapeutic protein is codon-optimized and CpG-depleted, and the multidomain therapeutic protein comprises the sequence set forth in SEQ ID NO: 572. In some such compositions, the coding sequence for the multidomain therapeutic protein comprises the sequence set forth in any one of SEQ ID NOS: 574-586. Optionally, the coding sequence for the multidomain therapeutic protein comprises the sequence set forth in any one of SEQ ID NOS: 584-586, optionally wherein the coding sequence for the multidomain therapeutic protein comprises the sequence set forth in SEQ ID NO: 584, optionally wherein the nucleic acid construct comprises the sequence set forth in SEQ ID NO: 733. Optionally, the coding sequence for the multidomain therapeutic protein comprises the sequence set forth in any one of SEQ ID NOS: 581-583, optionally wherein the coding sequence for the multidomain therapeutic protein comprises the sequence set forth in SEQ ID NO: 581, optionally wherein the nucleic acid construct comprises the sequence set forth in SEQ ID NO: 729. In some such compositions, the coding sequence for the multidomain therapeutic protein consists of the sequence set forth in any one of SEQ ID NOS: 574-586. Optionally, the coding sequence for the multidomain therapeutic protein consists of the sequence set forth in any one of SEQ ID NOS: 584-586, optionally wherein the coding sequence for the multidomain therapeutic protein consists of the sequence set forth in SEQ ID NO: 584, optionally wherein the nucleic acid construct comprises the sequence set forth in SEQ ID NO: 733. Optionally, the coding sequence for the multidomain therapeutic protein consists of the sequence set forth in any one of SEQ ID NOS: 581-583, optionally wherein the coding sequence for the multidomain therapeutic protein consists of the sequence set forth in SEQ ID NO: 581, optionally wherein the nucleic acid construct comprises the sequence set forth in SEQ ID NO: 729. In some such compositions, the nucleic acid construct comprises a splice acceptor upstream of the coding sequence for the multidomain therapeutic protein. In some such compositions, the nucleic acid construct comprises a polyadenylation signal or sequence downstream of the coding sequence for the multidomain therapeutic protein. In some such compositions, the nucleic acid construct comprises a splice acceptor upstream of the coding sequence for the multidomain therapeutic protein, and the nucleic acid construct comprises a polyadenylation signal or sequence downstream of the coding sequence for the multidomain therapeutic protein. In some such compositions, the nucleic acid construct does not comprise a homology arm. In some such compositions, the nucleic acid construct comprises homology arms. In some such compositions, the nucleic acid construct does not comprise a promoter that drives the expression of the multidomain therapeutic protein. In some such compositions, the coding sequence for the multidomain therapeutic protein is operably linked to a promoter, optionally wherein the promoter is a liver-specific promoter. In some such compositions, the nucleic acid construct is single-stranded DNA or double-stranded DNA. In some such compositions, the nucleic acid construct is single-stranded DNA. In some such compositions, the nucleic acid construct comprises from 5′ to 3′: a splice acceptor, the coding sequence for the multidomain therapeutic protein, and a polyadenylation signal or sequence, wherein the lysosomal alpha-glucosidase coding sequence comprises the sequence set forth in any one of SEQ ID NOS: 174-182 and 205-212, optionally wherein the lysosomal alpha-glucosidase coding sequence comprises the sequence set forth in SEQ ID NO: 176, optionally wherein the coding sequence for the multidomain therapeutic protein comprises the sequence set forth in any one of SEQ ID NOS: 574-586, and optionally wherein the coding sequence for the multidomain therapeutic protein comprises the sequence set forth in any one of SEQ ID NOS: 584-586, optionally wherein the coding sequence for the multidomain therapeutic protein comprises the sequence set forth in SEQ ID NO: 584, optionally wherein the nucleic acid construct comprises the sequence set forth in SEQ ID NO: 733, or optionally wherein the coding sequence for the multidomain therapeutic protein comprises the sequence set forth in any one of SEQ ID NOS: 581-583, optionally wherein the coding sequence for the multidomain therapeutic protein comprises the sequence set forth in SEQ ID NO: 581, optionally wherein the nucleic acid construct comprises the sequence set forth in SEQ ID NO: 729, wherein the nucleic acid construct does not comprise a promoter that drives the expression of the multidomain therapeutic protein, and wherein the nucleic acid construct does not comprise a homology arm. In some such compositions, the nucleic acid construct comprises from 5′ to 3′: a splice acceptor, the coding sequence for the multidomain therapeutic protein, and a polyadenylation signal or sequence, wherein the lysosomal alpha-glucosidase coding sequence comprises the sequence set forth in any one of SEQ ID NOS: 174-182, optionally wherein the lysosomal alpha-glucosidase coding sequence comprises the sequence set forth in SEQ ID NO: 176, optionally wherein the coding sequence for the multidomain therapeutic protein comprises the sequence set forth in any one of SEQ ID NOS: 574-586, and optionally wherein the coding sequence for the multidomain therapeutic protein comprises the sequence set forth in any one of SEQ ID NOS: 584-586, optionally wherein the coding sequence for the multidomain therapeutic protein comprises the sequence set forth in SEQ ID NO: 584, optionally wherein the nucleic acid construct comprises the sequence set forth in SEQ ID NO: 733, or optionally wherein the coding sequence for the multidomain therapeutic protein comprises the sequence set forth in any one of SEQ ID NOS: 581-583, optionally wherein the coding sequence for the multidomain therapeutic protein comprises the sequence set forth in SEQ ID NO: 581, optionally wherein the nucleic acid construct comprises the sequence set forth in SEQ ID NO: 729, wherein the nucleic acid construct does not comprise a promoter that drives the expression of the multidomain therapeutic protein, and wherein the nucleic acid construct does not comprise a homology arm.

[0093] In some such compositions, the nucleic acid construct is in a nucleic acid vector or a lipid nanoparticle. In some such compositions, the nucleic acid construct is in the nucleic acid vector. In some such compositions, the nucleic acid vector is a viral vector. In some such compositions, the nucleic acid vector is an adeno-associated viral (AAV) vector, optionally wherein the nucleic acid construct is flanked by inverted terminal repeats (ITRs) on each end, optionally wherein the ITR on at least one end comprises, consists essentially of, or consists of SEQ ID NO: 160, and optionally wherein the ITR on each end comprises, consists essentially of, or consists of SEQ ID NO: 160. In some such compositions, the AAV vector is a single-stranded AAV (ssAAV) vector. In some such compositions, the AAV vector is derived from an AAV8 vector, an AAV3B vector, an AAV5 vector, an AAV6 vector, an AAV7 vector, an AAV9 vector, an AAVrh.74 vector, or an AAVhu.37 vector. In some such compositions, the AAV vector is a recombinant AAV8 (rAAV8) vector. In some such compositions, the AAV vector is a single-stranded rAAV8 vector. In some such compositions, the nucleic acid construct comprises from 5′ to 3′: a splice acceptor, the coding sequence for the multidomain therapeutic protein, and a polyadenylation signal or sequence, wherein the lysosomal alpha-glucosidase coding sequence comprises the sequence set forth in any one of SEQ ID NOS: 174-182 and 205-212, optionally wherein the lysosomal alpha-glucosidase coding sequence comprises the sequence set forth in SEQ ID NO: 176, optionally wherein the coding sequence for the multidomain therapeutic protein comprises the sequence set forth in any one of SEQ ID NOS: 574-586, and optionally wherein the coding sequence for the multidomain therapeutic protein comprises the sequence set forth in any one of SEQ ID NOS: 584-586, optionally wherein the coding sequence for the multidomain therapeutic protein comprises the sequence set forth in SEQ ID NO: 584, optionally wherein the nucleic acid construct comprises the sequence set forth in SEQ ID NO: 733, or optionally wherein the coding sequence for the multidomain therapeutic protein comprises the sequence set forth in any one of SEQ ID NOS: 581-583, optionally wherein the coding sequence for the multidomain therapeutic protein comprises the sequence set forth in SEQ ID NO: 581, optionally wherein the nucleic acid construct comprises the sequence set forth in SEQ ID NO: 729, wherein the nucleic acid construct does not comprise a promoter that drives the expression of the multidomain therapeutic protein, wherein the nucleic acid construct does not comprise a homology arm, and wherein the nucleic acid construct is in a single-stranded rAAV8 vector, optionally wherein the nucleic acid construct is flanked by inverted terminal repeats (ITRs) on each end, optionally wherein the ITR on at least one end comprises, consists essentially of, or consists of SEQ ID NO: 160, and optionally wherein the ITR on each end comprises, consists essentially of, or consists of SEQ ID NO: 160. In some such compositions, the nucleic acid construct comprises from 5′ to 3′: a splice acceptor, the coding sequence for the multidomain therapeutic protein, and a polyadenylation signal or sequence, wherein the lysosomal alpha-glucosidase coding sequence comprises the sequence set forth in any one of SEQ ID NOS: 174-182, optionally wherein the lysosomal alpha-glucosidase coding sequence comprises the sequence set forth in SEQ ID NO: 176, optionally wherein the coding sequence for the multidomain therapeutic protein comprises the sequence set forth in any one of SEQ ID NOS: 574-586, and optionally wherein the coding sequence for the multidomain therapeutic protein comprises the sequence set forth in any one of SEQ ID NOS: 584-586, optionally wherein the coding sequence for the multidomain therapeutic protein comprises the sequence set forth in SEQ ID NO: 584, optionally wherein the nucleic acid construct comprises the sequence set forth in SEQ ID NO: 733, or optionally wherein the coding sequence for the multidomain therapeutic protein comprises the sequence set forth in any one of SEQ ID NOS: 581-583, optionally wherein the coding sequence for the multidomain therapeutic protein comprises the sequence set forth in SEQ ID NO: 581, optionally wherein the nucleic acid construct comprises the sequence set forth in SEQ ID NO: 729, wherein the nucleic acid construct does not comprise a promoter that drives the expression of the multidomain therapeutic protein, wherein the nucleic acid construct does not comprise a homology arm, and wherein the nucleic acid construct is in a single-stranded rAAV8 vector, optionally wherein the nucleic acid construct is flanked by inverted terminal repeats (ITRs) on each end, optionally wherein the ITR on at least one end comprises, consists essentially of, or consists of SEQ ID NO: 160, and optionally wherein the ITR on each end comprises, consists essentially of, or consists of SEQ ID NO: 160. In some such compositions, the nucleic acid construct is CpG-depleted.

[0094] In some such compositions, the composition further comprises a nuclease agent that targets a nuclease target site in a target genomic locus. In some such compositions, the target genomic locus is an albumin gene, optionally wherein the albumin gene is a human albumin gene. In some such compositions, the nuclease target site is in intron 1 of the albumin gene. In some such compositions, the nuclease agent comprises: (a) a zinc finger nuclease (ZFN); (b) a transcription activator-like effector nuclease (TALEN); or (c) (i) a Cas protein or a nucleic acid encoding the Cas protein; and (ii) a guide RNA or one or more DNAs encoding the guide RNA, wherein the guide RNA comprises a DNA-targeting segment that targets a guide RNA target sequence, and wherein the guide RNA binds to the Cas protein and targets the Cas protein to the guide RNA target sequence.

[0095] In some such compositions, the nuclease agent comprises: (a) a Cas protein or a nucleic acid encoding the Cas protein; and (b) a guide RNA or one or more DNAs encoding the guide RNA, wherein the guide RNA comprises a DNA-targeting segment that targets a guide RNA target sequence, and wherein the guide RNA binds to the Cas protein and targets the Cas protein to the guide RNA target sequence. In some such compositions, the guide RNA target sequence is in intron 1 of an albumin gene. In some such compositions, the albumin gene is a human albumin gene. In some such compositions, the DNA-targeting segment comprises at least 17, at least 18, at least 19, or at least 20 contiguous nucleotides of the sequence set forth in any one of SEQ ID NOS: 30-61, optionally wherein the DNA-targeting segment comprises at least 17, at least 18, at least 19, or at least 20 contiguous nucleotides of the sequence set forth in any one of SEQ ID NOS: 36, 30, 33, and 41. In some such compositions, the DNA-targeting segment is at least 90% or at least 95% identical to the sequence set forth in any one of SEQ ID NOS: 30-61, optionally wherein the DNA-targeting segment is at least 90% or at least 95% identical to the sequence set forth in any one of SEQ ID NOS: 36, 30, 33, and 41. In some such compositions, the DNA-targeting segment comprises any one of SEQ ID NOS: 30-61, optionally wherein the DNA-targeting segment comprises any one of SEQ ID NOS: 36, 30, 33, and 41. In some such compositions, the DNA-targeting segment consists of any one of SEQ ID NOS: 30-61, optionally wherein the DNA-targeting segment consists of any one of SEQ ID NOS: 36, 30, 33, and 41. In some such compositions, the guide RNA comprises any one of SEQ ID NOS: 62-125, optionally wherein the guide RNA comprises any one of SEQ ID NOS: 68, 100, 62, 94, 65, 97, 73, and 105. In some such compositions, the DNA-targeting segment comprises at least 17, at least 18, at least 19, or at least 20 contiguous nucleotides of SEQ ID NO: 36. In some such compositions, the DNA-targeting segment is at least 90% or at least 95% identical to SEQ ID NO: 36. In some such compositions, the DNA-targeting segment comprises SEQ ID NO: 36. In some such compositions, the DNA-targeting segment consists of SEQ ID NO: 36. In some such compositions, the guide RNA comprises SEQ ID NO: 68 or 100.

[0096] In some such compositions, the guide RNA in the form of RNA. In some such compositions, the guide RNA comprises at least one modification. In some such compositions, the at least one modification comprises a 2′-O-methyl-modified nucleotide. In some such compositions, the at least one modification comprises a phosphorothioate bond between nucleotides. In some such compositions, the at least one modification comprises a modification at one or more of the first five nucleotides at the 5′ end of the guide RNA. In some such compositions, the at least one modification comprises a modification at one or more of the last five nucleotides at the 3′ end of the guide RNA. In some such compositions, the at least one modification comprises phosphorothioate bonds between the first four nucleotides at the 5′ end of the guide RNA. In some such compositions, the at least one modification comprises phosphorothioate bonds between the last four nucleotides at the 3′ end of the guide RNA. In some such compositions, the at least one modification comprises 2′-O-methyl-modified nucleotides at the first three nucleotides at the 5′ end of the guide RNA. In some such compositions, the at least one modification comprises 2′-O-methyl-modified nucleotides at the last three nucleotides at the 3′ end of the guide RNA. In some such compositions, the at least one modification comprises: (i) phosphorothioate bonds between the first four nucleotides at the 5′ end of the guide RNA; (ii) phosphorothioate bonds between the last four nucleotides at the 3′ end of the guide RNA; (iii) 2′-O-methyl-modified nucleotides at the first three nucleotides at the 5′ end of the guide RNA; and (iv) 2′-O-methyl-modified nucleotides at the last three nucleotides at the 3′ end of the guide RNA. In some such compositions, the guide RNA is a single guide RNA (sgRNA). In some such compositions, the guide RNA in the form of RNA, the guide RNA comprises SEQ ID NO: 100, and the guide RNA comprises: (i) phosphorothioate bonds between the first four nucleotides at the 5′ end of the guide RNA; (ii) phosphorothioate bonds between the last four nucleotides at the 3′ end of the guide RNA; (iii) 2′-O-methyl-modified nucleotides at the first three nucleotides at the 5′ end of the guide RNA; and (iv) 2′-O-methyl-modified nucleotides at the last three nucleotides at the 3′ end of the guide RNA.

[0097] In some such compositions, the Cas protein is a Cas9 protein. In some such compositions, the Cas9 protein is derived from a Streptococcus pyogenes Cas9 protein, a Staphylococcus aureus Cas9 protein, a Campylobacter jejuni Cas9 protein, a Streptococcus thermophilus Cas9 protein, or a Neisseria meningitidis Cas9 protein. In some such compositions, the Cas protein is derived from a Streptococcus pyogenes Cas9 protein. In some such compositions, the Cas protein comprises the sequence set forth in SEQ ID NO: 11. In some such compositions, the nucleic acid encoding the Cas protein is codon-optimized for expression in a mammalian cell or a human cell. In some such compositions, the composition comprises the nucleic acid encoding the Cas protein, wherein the nucleic acid comprises an mRNA encoding the Cas protein. In some such compositions, the mRNA encoding the Cas protein comprises at least one modification. In some such compositions, the mRNA encoding the Cas protein is modified to comprise a modified uridine at one or more or all uridine positions. In some such compositions, the modified uridine is pseudouridine or N1-methyl-pseudouridine, optionally N1-methyl-pseudouridine. In some such compositions, the mRNA encoding the Cas protein is fully substituted with pseudouridine or N1-methyl-pseudouridine, optionally N1-methyl-pseudouridine. In some such compositions, the modified uridine is pseudouridine. In some such compositions, the mRNA encoding the Cas protein is fully substituted with pseudouridine. In some such compositions, the mRNA encoding the Cas protein comprises a 5′ cap. In some such compositions, the mRNA encoding the Cas protein comprises a polyadenylation sequence. In some such compositions, the mRNA encoding the Cas protein comprises the sequence set forth in SEQ ID NO: 226, 225, or 12. In some such compositions, the composition comprises the nucleic acid encoding the Cas protein, wherein the nucleic acid comprises an mRNA encoding the Cas protein, the mRNA encoding the Cas protein comprises the sequence set forth in SEQ ID NO: 226, 225, or 12, and the mRNA encoding the Cas protein is fully substituted with pseudouridine or N1-methyl-pseudouridine, optionally N1-methyl-pseudouridine, comprises a 5′ cap, and comprises a polyadenylation sequence. In some such compositions, the composition comprises the nucleic acid encoding the Cas protein, wherein the nucleic acid comprises an mRNA encoding the Cas protein, the mRNA encoding the Cas protein comprises the sequence set forth in SEQ ID NO: 226, 225, or 12, and the mRNA encoding the Cas protein is fully substituted with pseudouridine, comprises a 5′ cap, and comprises a polyadenylation sequence.

[0098] In some such compositions, the guide RNA in the form of RNA, and the guide RNA comprises SEQ ID NO: 68 or 100, and wherein the composition comprises the nucleic acid encoding the Cas protein, wherein the nucleic acid comprises an mRNA encoding the Cas protein, and the mRNA encoding the Cas protein comprises the sequence set forth in SEQ ID NO: 226, 225, or 12. In some such compositions, the nucleic acid construct comprises from 5′ to 3′: a splice acceptor, the coding sequence for the multidomain therapeutic protein, and a polyadenylation signal or sequence, wherein the lysosomal alpha-glucosidase coding sequence comprises the sequence set forth in any one of SEQ ID NOS: 174-182 and 205-212, optionally wherein the lysosomal alpha-glucosidase coding sequence comprises the sequence set forth in SEQ ID NO: 176, optionally wherein the coding sequence for the multidomain therapeutic protein comprises the sequence set forth in any one of SEQ ID NOS: 574-586, and optionally wherein the coding sequence for the multidomain therapeutic protein comprises the sequence set forth in any one of SEQ ID NOS: 584-586, optionally wherein the coding sequence for the multidomain therapeutic protein comprises the sequence set forth in SEQ ID NO: 584, optionally wherein the nucleic acid construct comprises the sequence set forth in SEQ ID NO: 733, or optionally wherein the coding sequence for the multidomain therapeutic protein comprises the sequence set forth in any one of SEQ ID NOS: 581-583, optionally wherein the coding sequence for the multidomain therapeutic protein comprises the sequence set forth in SEQ ID NO: 581, optionally wherein the nucleic acid construct comprises the sequence set forth in SEQ ID NO: 729, wherein the nucleic acid construct does not comprise a promoter that drives the expression of the multidomain therapeutic protein, wherein the nucleic acid construct does not comprise a homology arm, and wherein the nucleic acid construct is in a single-stranded rAAV8 vector, optionally wherein the nucleic acid construct is flanked by inverted terminal repeats (ITRs) on each end, optionally wherein the ITR on at least one end comprises, consists essentially of, or consists of SEQ ID NO: 160, and optionally wherein the ITR on each end comprises, consists essentially of, or consists of SEQ ID NO: 160. In some such compositions, the nucleic acid construct comprises from 5′ to 3′: a splice acceptor, the coding sequence for the multidomain therapeutic protein, and a polyadenylation signal or sequence, wherein the lysosomal alpha-glucosidase coding sequence comprises the sequence set forth in any one of SEQ ID NOS: 174-182, optionally wherein the lysosomal alpha-glucosidase coding sequence comprises the sequence set forth in SEQ ID NO: 176, optionally wherein the coding sequence for the multidomain therapeutic protein comprises the sequence set forth in any one of SEQ ID NOS: 574-586, and optionally wherein the coding sequence for the multidomain therapeutic protein comprises the sequence set forth in any one of SEQ ID NOS: 584-586, optionally wherein the coding sequence for the multidomain therapeutic protein comprises the sequence set forth in SEQ ID NO: 584, optionally wherein the nucleic acid construct comprises the sequence set forth in SEQ ID NO: 733, or optionally wherein the coding sequence for the multidomain therapeutic protein comprises the sequence set forth in any one of SEQ ID NOS: 581-583, optionally wherein the coding sequence for the multidomain therapeutic protein comprises the sequence set forth in SEQ ID NO: 581, optionally wherein the nucleic acid construct comprises the sequence set forth in SEQ ID NO: 729, wherein the nucleic acid construct does not comprise a promoter that drives the expression of the multidomain therapeutic protein, wherein the nucleic acid construct does not comprise a homology arm, and wherein the nucleic acid construct is in a single-stranded rAAV8 vector, optionally wherein the nucleic acid construct is flanked by inverted terminal repeats (ITRs) on each end, optionally wherein the ITR on at least one end comprises, consists essentially of, or consists of SEQ ID NO: 160, and optionally wherein the ITR on each end comprises, consists essentially of, or consists of SEQ ID NO: 160. In some such compositions, the guide RNA in the form of RNA, the guide RNA comprises SEQ ID NO: 100, and the guide RNA comprises: (i) phosphorothioate bonds between the first four nucleotides at the 5′ end of the guide RNA; (ii) phosphorothioate bonds between the last four nucleotides at the 3′ end of the guide RNA; (iii) 2′-O-methyl-modified nucleotides at the first three nucleotides at the 5′ end of the guide RNA; and (iv) 2′-O-methyl-modified nucleotides at the last three nucleotides at the 3′ end of the guide RNA, and wherein the composition comprises the nucleic acid encoding the Cas protein, wherein the nucleic acid comprises an mRNA encoding the Cas protein, the mRNA encoding the Cas protein comprises the sequence set forth in SEQ ID NO: 226, 225, or 12, and the mRNA encoding the Cas protein is fully substituted with pseudouridine or N1-methyl-pseudouridine, optionally N1-methyl-pseudouridine, comprises a 5′ cap, and comprises a polyadenylation sequence. In some such compositions, the guide RNA in the form of RNA, the guide RNA comprises SEQ ID NO: 100, and the guide RNA comprises: (i) phosphorothioate bonds between the first four nucleotides at the 5′ end of the guide RNA; (ii) phosphorothioate bonds between the last four nucleotides at the 3′ end of the guide RNA; (iii) 2′-O-methyl-modified nucleotides at the first three nucleotides at the 5′ end of the guide RNA; and (iv) 2′-O-methyl-modified nucleotides at the last three nucleotides at the 3′ end of the guide RNA, and wherein the composition comprises the nucleic acid encoding the Cas protein, wherein the nucleic acid comprises an mRNA encoding the Cas protein, the mRNA encoding the Cas protein comprises the sequence set forth in SEQ ID NO: 226, 225, or 12, and the mRNA encoding the Cas protein is fully substituted with pseudouridine, comprises a 5′ cap, and comprises a polyadenylation sequence. In some such compositions, the nucleic acid construct comprises from 5′ to 3′: a splice acceptor, the coding sequence for the multidomain therapeutic protein, and a polyadenylation signal or sequence, wherein the lysosomal alpha-glucosidase coding sequence comprises the sequence set forth in any one of SEQ ID NOS: 174-182 and 205-212, optionally wherein the lysosomal alpha-glucosidase coding sequence comprises the sequence set forth in SEQ ID NO: 176, optionally wherein the coding sequence for the multidomain therapeutic protein comprises the sequence set forth in any one of SEQ ID NOS: 574-586, and optionally wherein the coding sequence for the multidomain therapeutic protein comprises the sequence set forth in any one of SEQ ID NOS: 584-586, optionally wherein the coding sequence for the multidomain therapeutic protein comprises the sequence set forth in SEQ ID NO: 584, optionally wherein the nucleic acid construct comprises the sequence set forth in SEQ ID NO: 733, or optionally wherein the coding sequence for the multidomain therapeutic protein comprises the sequence set forth in any one of SEQ ID NOS: 581-583, optionally wherein the coding sequence for the multidomain therapeutic protein comprises the sequence set forth in SEQ ID NO: 581, optionally wherein the nucleic acid construct comprises the sequence set forth in SEQ ID NO: 729, wherein the nucleic acid construct does not comprise a promoter that drives the expression of the multidomain therapeutic protein, wherein the nucleic acid construct does not comprise a homology arm, and wherein the nucleic acid construct is in a single-stranded rAAV8 vector, optionally wherein the nucleic acid construct is flanked by inverted terminal repeats (ITRs) on each end, optionally wherein the ITR on at least one end comprises, consists essentially of, or consists of SEQ ID NO: 160, and optionally wherein the ITR on each end comprises, consists essentially of, or consists of SEQ ID NO: 160. In some such compositions, the nucleic acid construct comprises from 5′ to 3′: a splice acceptor, the coding sequence for the multidomain therapeutic protein, and a polyadenylation signal or sequence, wherein the lysosomal alpha-glucosidase coding sequence comprises the sequence set forth in any one of SEQ ID NOS: 174-182, optionally wherein the lysosomal alpha-glucosidase coding sequence comprises the sequence set forth in SEQ ID NO: 176, optionally wherein the coding sequence for the multidomain therapeutic protein comprises the sequence set forth in any one of SEQ ID NOS: 574-586, and optionally wherein the coding sequence for the multidomain therapeutic protein comprises the sequence set forth in any one of SEQ ID NOS: 584-586, optionally wherein the coding sequence for the multidomain therapeutic protein comprises the sequence set forth in SEQ ID NO: 584, optionally wherein the nucleic acid construct comprises the sequence set forth in SEQ ID NO: 733, or optionally wherein the coding sequence for the multidomain therapeutic protein comprises the sequence set forth in any one of SEQ ID NOS: 581-583, optionally wherein the coding sequence for the multidomain therapeutic protein comprises the sequence set forth in SEQ ID NO: 581, optionally wherein the nucleic acid construct comprises the sequence set forth in SEQ ID NO: 729, wherein the nucleic acid construct does not comprise a promoter that drives the expression of the multidomain therapeutic protein, wherein the nucleic acid construct does not comprise a homology arm, and wherein the nucleic acid construct is in a single-stranded rAAV8 vector, optionally wherein the nucleic acid construct is flanked by inverted terminal repeats (ITRs) on each end, optionally wherein the ITR on at least one end comprises, consists essentially of, or consists of SEQ ID NO: 160, and optionally wherein the ITR on each end comprises, consists essentially of, or consists of SEQ ID NO: 160.

[0099] In some such compositions, the Cas protein or the nucleic acid encoding the Cas protein and the guide RNA or the one or more DNAs encoding the guide RNA are associated with a lipid nanoparticle. In some such compositions, the lipid nanoparticle comprises a cationic lipid, a neutral lipid, a helper lipid, and a stealth lipid. In some such compositions, the cationic lipid is Lipid A ((9Z,12Z)-3-((4,4-bis(octyloxy)butanoyl)oxy)-2-((((3-(diethylamino)propoxy)carbonyl)oxy)methyl)propyl octadeca-9,12-dienoate). In some such compositions, the neutral lipid is distearoylphosphatidylcholine or 1,2-distearoyl-sn-glycero-3-phosphocholine (DSPC). In some such compositions, the helper lipid is cholesterol. In some such compositions, the stealth lipid is PEG2k-DMG. In some such compositions, the cationic lipid is Lipid A, the neutral lipid is DSPC, the helper lipid is cholesterol, and the stealth lipid is PEG2k-DMG. In some such compositions, the lipid nanoparticle comprises four lipids at the following molar ratios: about 50 mol% Lipid A, about 9 mol% DSPC, about 38 mol% cholesterol, and about 3 mol% PEG2k-DMG.

[0100] In some such compositions, the albumin gene is a human albumin gene, wherein the guide RNA in the form of RNA, and the guide RNA comprises SEQ ID NO: 68 or 100, wherein the composition comprises the nucleic acid encoding the Cas protein, wherein the nucleic acid comprises an mRNA encoding the Cas protein, and the mRNA encoding the Cas protein comprises the sequence set forth in SEQ ID NO: 226, 225, or 12, and wherein the guide RNA and the mRNA encoding the Cas protein are associated with a lipid nanoparticle comprising Lipid A, DSPC, cholesterol, and PEG2k-DMG, optionally at the following molar ratios: about 50 mol% Lipid A, about 9 mol% DSPC, about 38 mol% cholesterol, and about 3 mol% PEG2k-DMG. In some such compositions, the nucleic acid construct comprises from 5′ to 3′: a splice acceptor, the coding sequence for the multidomain therapeutic protein, and a polyadenylation signal or sequence, wherein the lysosomal alpha-glucosidase coding sequence comprises the sequence set forth in any one of SEQ ID NOS: 174-182 and 205-212, optionally wherein the lysosomal alpha-glucosidase coding sequence comprises the sequence set forth in SEQ ID NO: 176, optionally wherein the coding sequence for the multidomain therapeutic protein comprises the sequence set forth in any one of SEQ ID NOS: 574-586, and optionally wherein the coding sequence for the multidomain therapeutic protein comprises the sequence set forth in any one of SEQ ID NOS: 584-586, optionally wherein the coding sequence for the multidomain therapeutic protein comprises the sequence set forth in SEQ ID NO: 584, optionally wherein the nucleic acid construct comprises the sequence set forth in SEQ ID NO: 733, or optionally wherein the coding sequence for the multidomain therapeutic protein comprises the sequence set forth in any one of SEQ ID NOS: 581-583, optionally wherein the coding sequence for the multidomain therapeutic protein comprises the sequence set forth in SEQ ID NO: 581, optionally wherein the nucleic acid construct comprises the sequence set forth in SEQ ID NO: 729, wherein the nucleic acid construct does not comprise a promoter that drives the expression of the multidomain therapeutic protein, wherein the nucleic acid construct does not comprise a homology arm, and wherein the nucleic acid construct is in a single-stranded rAAV8 vector, optionally wherein the nucleic acid construct is flanked by inverted terminal repeats (ITRs) on each end, optionally wherein the ITR on at least one end comprises, consists essentially of, or consists of SEQ ID NO: 160, and optionally wherein the ITR on each end comprises, consists essentially of, or consists of SEQ ID NO: 160. In some such compositions, the nucleic acid construct comprises from 5′ to 3′: a splice acceptor, the coding sequence for the multidomain therapeutic protein, and a polyadenylation signal or sequence, wherein the lysosomal alpha-glucosidase coding sequence comprises the sequence set forth in any one of SEQ ID NOS: 174-182, optionally wherein the lysosomal alpha-glucosidase coding sequence comprises the sequence set forth in SEQ ID NO: 176, optionally wherein the coding sequence for the multidomain therapeutic protein comprises the sequence set forth in any one of SEQ ID NOS: 574-586, and optionally wherein the coding sequence for the multidomain therapeutic protein comprises the sequence set forth in any one of SEQ ID NOS: 584-586, optionally wherein the coding sequence for the multidomain therapeutic protein comprises the sequence set forth in SEQ ID NO: 584, optionally wherein the nucleic acid construct comprises the sequence set forth in SEQ ID NO: 733, or optionally wherein the coding sequence for the multidomain therapeutic protein comprises the sequence set forth in any one of SEQ ID NOS: 581-583, optionally wherein the coding sequence for the multidomain therapeutic protein comprises the sequence set forth in SEQ ID NO: 581, optionally wherein the nucleic acid construct comprises the sequence set forth in SEQ ID NO: 729, wherein the nucleic acid construct does not comprise a promoter that drives the expression of the multidomain therapeutic protein, wherein the nucleic acid construct does not comprise a homology arm, and wherein the nucleic acid construct is in a single-stranded rAAV8 vector, optionally wherein the nucleic acid construct is flanked by inverted terminal repeats (ITRs) on each end, optionally wherein the ITR on at least one end comprises, consists essentially of, or consists of SEQ ID NO: 160, and optionally wherein the ITR on each end comprises, consists essentially of, or consists of SEQ ID NO: 160.

[0101] In some such compositions, the albumin gene is a human albumin gene, wherein the guide RNA in the form of RNA, the guide RNA comprises SEQ ID NO: 100, and the guide RNA comprises: (i) phosphorothioate bonds between the first four nucleotides at the 5′ end of the guide RNA; (ii) phosphorothioate bonds between the last four nucleotides at the 3′ end of the guide RNA; (iii) 2′-O-methyl-modified nucleotides at the first three nucleotides at the 5′ end of the guide RNA; and (iv) 2′-O-methyl-modified nucleotides at the last three nucleotides at the 3′ end of the guide RNA, wherein the composition comprises the nucleic acid encoding the Cas protein, wherein the nucleic acid comprises an mRNA encoding the Cas protein, the mRNA encoding the Cas protein comprises the sequence set forth in SEQ ID NO: 226, 225, or 12, and the mRNA encoding the Cas protein is fully substituted with pseudouridine or N1-methyl-pseudouridine, optionally N1-methyl-pseudouridine, comprises a 5′ cap, and comprises a polyadenylation sequence, and wherein the guide RNA and the mRNA encoding the Cas protein are associated with a lipid nanoparticle comprising Lipid A, DSPC, cholesterol, and PEG2k-DMG, optionally at the following molar ratios: about 50 mol% Lipid A, about 9 mol% DSPC, about 38 mol% cholesterol, and about 3 mol% PEG2k-DMG. In some such compositions, the albumin gene is a human albumin gene, wherein the guide RNA in the form of RNA, the guide RNA comprises SEQ ID NO: 100, and the guide RNA comprises: (i) phosphorothioate bonds between the first four nucleotides at the 5′ end of the guide RNA; (ii) phosphorothioate bonds between the last four nucleotides at the 3′ end of the guide RNA; (iii) 2′-O-methyl-modified nucleotides at the first three nucleotides at the 5′ end of the guide RNA; and (iv) 2′-O-methyl-modified nucleotides at the last three nucleotides at the 3′ end of the guide RNA, wherein the composition comprises the nucleic acid encoding the Cas protein, wherein the nucleic acid comprises an mRNA encoding the Cas protein, the mRNA encoding the Cas protein comprises the sequence set forth in SEQ ID NO: 226, 225, or 12, and the mRNA encoding the Cas protein is fully substituted with pseudouridine, comprises a 5′ cap, and comprises a polyadenylation sequence, and wherein the guide RNA and the mRNA encoding the Cas protein are associated with a lipid nanoparticle comprising Lipid A, DSPC, cholesterol, and PEG2k-DMG, optionally at the following molar ratios: about 50 mol% Lipid A, about 9 mol% DSPC, about 38 mol% cholesterol, and about 3 mol% PEG2k-DMG. In some such compositions, the nucleic acid construct comprises from 5′ to 3′: a splice acceptor, the coding sequence for the multidomain therapeutic protein, and a polyadenylation signal or sequence, wherein the lysosomal alpha-glucosidase coding sequence comprises the sequence set forth in any one of SEQ ID NOS: 174-182 and 205-212, optionally wherein the lysosomal alpha-glucosidase coding sequence comprises the sequence set forth in SEQ ID NO: 176, optionally wherein the coding sequence for the multidomain therapeutic protein comprises the sequence set forth in any one of SEQ ID NOS: 574-586, and optionally wherein the coding sequence for the multidomain therapeutic protein comprises the sequence set forth in any one of SEQ ID NOS: 584-586, optionally wherein the coding sequence for the multidomain therapeutic protein comprises the sequence set forth in SEQ ID NO: 584, optionally wherein the nucleic acid construct comprises the sequence set forth in SEQ ID NO: 733, or optionally wherein the coding sequence for the multidomain therapeutic protein comprises the sequence set forth in any one of SEQ ID NOS: 581-583, optionally wherein the coding sequence for the multidomain therapeutic protein comprises the sequence set forth in SEQ ID NO: 581, optionally wherein the nucleic acid construct comprises the sequence set forth in SEQ ID NO: 729, wherein the nucleic acid construct does not comprise a promoter that drives the expression of the multidomain therapeutic protein, wherein the nucleic acid construct does not comprise a homology arm, and wherein the nucleic acid construct is in a single-stranded rAAV8 vector, optionally wherein the nucleic acid construct is flanked by inverted terminal repeats (ITRs) on each end, optionally wherein the ITR on at least one end comprises, consists essentially of, or consists of SEQ ID NO: 160, and optionally wherein the ITR on each end comprises, consists essentially of, or consists of SEQ ID NO: 160. In some such compositions, the nucleic acid construct comprises from 5′ to 3′: a splice acceptor, the coding sequence for the multidomain therapeutic protein, and a polyadenylation signal or sequence, wherein the lysosomal alpha-glucosidase coding sequence comprises the sequence set forth in any one of SEQ ID NOS: 174-182, optionally wherein the lysosomal alpha-glucosidase coding sequence comprises the sequence set forth in SEQ ID NO: 176, optionally wherein the coding sequence for the multidomain therapeutic protein comprises the sequence set forth in any one of SEQ ID NOS: 574-586, and optionally wherein the coding sequence for the multidomain therapeutic protein comprises the sequence set forth in any one of SEQ ID NOS: 584-586, optionally wherein the coding sequence for the multidomain therapeutic protein comprises the sequence set forth in SEQ ID NO: 584, optionally wherein the nucleic acid construct comprises the sequence set forth in SEQ ID NO: 733, or optionally wherein the coding sequence for the multidomain therapeutic protein comprises the sequence set forth in any one of SEQ ID NOS: 581-583, optionally wherein the coding sequence for the multidomain therapeutic protein comprises the sequence set forth in SEQ ID NO: 581, optionally wherein the nucleic acid construct comprises the sequence set forth in SEQ ID NO: 729, wherein the nucleic acid construct does not comprise a promoter that drives the expression of the multidomain therapeutic protein, wherein the nucleic acid construct does not comprise a homology arm, and wherein the nucleic acid construct is in a single-stranded rAAV8 vector, optionally wherein the nucleic acid construct is flanked by inverted terminal repeats (ITRs) on each end, optionally wherein the ITR on at least one end comprises, consists essentially of, or consists of SEQ ID NO: 160, and optionally wherein the ITR on each end comprises, consists essentially of, or consists of SEQ ID NO: 160.

[0102] In some such compositions, the composition is for use in a method of inserting the nucleic acid encoding the multidomain therapeutic protein into a target genomic locus in a cell or a population of cells. In some such compositions, the composition is for use in a method of expressing the multidomain therapeutic protein from a target genomic locus in a cell or a population of cells. In some such compositions, the composition is for use in a method of expressing the multidomain therapeutic protein in a cell or a population of cells. In some such compositions, the composition is for use in a method of inserting the nucleic acid encoding the multidomain therapeutic protein into a target genomic locus in a cell or a population of cells in a subject. In some such compositions, the composition is for use in a method of expressing the multidomain therapeutic protein from a target genomic locus in a cell or a population of cells in a subject. In some such compositions, the composition is for use in a method of expressing the multidomain therapeutic protein in a cell or a population of cells in a subject. In some such compositions, the cell is a neonatal cell and the population of cells is a population of neonatal cells. In some such compositions, the neonatal cell or the population of neonatal cells is from a human neonatal subject within 24 weeks after birth. In some such compositions, the neonatal cell or the population of neonatal cells is from a human neonatal subject within 12 weeks after birth. In some such compositions, the neonatal cell or the population of neonatal cells is from a human neonatal subject within 8 weeks after birth. In some such compositions, the neonatal cell or the population of neonatal cells is from a human neonatal subject within 4 weeks after birth. In some such compositions, the cell is a not a neonatal cell and the population of cells is not a population of neonatal cells. In some such compositions, the composition is for use in a method of treating a lysosomal alpha-glucosidase deficiency in a subject in need thereof. In some such compositions, the composition is for use in a method of reducing glycogen accumulation in a tissue in a subject in need thereof. In some such compositions, the composition is for use in a method of treating Pompe disease in a subject in need thereof. In some such compositions, the composition is for use in a method of preventing or reducing the onset of a sign or symptom of Pompe disease in a neonatal subject in need thereof. In some such compositions, the subject is a neonatal subject. In some such compositions, the neonatal subject is a human neonatal subject within 24 weeks after birth. In some such compositions, the neonatal subject is a human neonatal subject within 12 weeks after birth. In some such compositions, the neonatal subject is a human neonatal subject within 8 weeks after birth. In some such compositions, the neonatal subject is a human neonatal subject within 4 weeks after birth. In some such compositions, the subject is not a neonatal subject.

[0103] In another aspect, provided is a cell comprising any of the above compositions. In some such cells, the nucleic acid construct is integrated into a target genomic locus, and wherein the multidomain therapeutic protein is expressed from the target genomic locus, or wherein the nucleic acid construct is integrated into intron 1 of an endogenous albumin locus, and wherein the multidomain therapeutic protein is expressed from the endogenous albumin locus. In some such cells, the cell is a human cell. In some such cells, the cell is a liver cell. In some such cells, the liver cell is a hepatocyte. In some such cells, the cell is a neonatal cell. In some such cells, the neonatal cell is from a human neonatal subject within 24 weeks after birth. In some such cells, the neonatal cell is from a human neonatal subject within 12 weeks after birth. In some such cells, the neonatal cell is from a human neonatal subject within 8 weeks after birth. In some such cells, the neonatal cell is from a human neonatal subject within 4 weeks after birth. In some such cells, the cell is not a neonatal cell. In some such cells, the cell is in vivo. In some such cells, the cell is in vitro or ex vivo.

[0104] In another aspect, provided are methods of inserting a nucleic acid encoding a multidomain therapeutic protein comprising a TfR-binding delivery domain fused to a lysosomal alpha-glucosidase into a target genomic locus in a cell or a population of cells. Some such methods comprise administering to the cell or the population of cells any of the above compositions, wherein the nuclease agent cleaves the nuclease target site in the target genomic locus, and the nucleic acid construct is inserted into the target genomic locus. In another aspect, provided are methods of expressing a multidomain therapeutic protein comprising a TfR-binding delivery domain fused to a lysosomal alpha-glucosidase in a cell or a population of cells. Some such methods comprise administering to the cell or the population of cells any of the above compositions, wherein the coding sequence for the multidomain therapeutic protein is operably linked to a promoter in the nucleic acid construct and is expressed in the cell or population of cells. In another aspect, provided are methods of expressing a multidomain therapeutic protein comprising a TfR-binding delivery domain fused to a lysosomal alpha-glucosidase from a target genomic locus in a cell or a population of cells. Some such methods comprise administering to the cell or the population of cells any of the above compositions, wherein the nuclease agent cleaves the nuclease target site in the target genomic locus, the nucleic acid construct is inserted into the target genomic locus to create a modified target genomic locus, and the multidomain therapeutic protein comprising the TfR-binding delivery domain fused to the lysosomal alpha-glucosidase is expressed from the modified target genomic locus. In some such methods, the cell is a liver cell or the population of cells is a population of liver cells. In some such methods, the cell is a hepatocyte or the population of cells is a population of hepatocytes. In some such methods, the cell is a human cell or the population of cells is a population of human cells. In some such methods, the cell is a neonatal cell or the population of cells is a population of neonatal cells. In some such methods, the neonatal cell or the population of neonatal cells is from a human neonatal subject within 24 weeks after birth. In some such methods, the neonatal cell or the population of neonatal cells is from a human neonatal subject within 12 weeks after birth. In some such methods, the neonatal cell or the population of neonatal cells is from a human neonatal subject within 8 weeks after birth. In some such methods, the neonatal cell or the population of neonatal cells is from a human neonatal subject within 4 weeks after birth. In some such methods, the cell is not a neonatal cell or the population of cells is not a population of neonatal cells. In some such methods, the cell is in vitro or ex vivo or the population of cells is in vitro or ex vivo. In some such methods, the cell is in vivo in a subject or the population of cells is in vivo in a subject.

[0105] In another aspect, provided are methods of inserting a nucleic acid encoding a multidomain therapeutic protein comprising a TfR-binding delivery domain fused to a lysosomal alpha-glucosidase into a target genomic locus in a cell or a population of cells in a subject. Some such methods comprise administering to the subject any of the above compositions, wherein the nuclease agent cleaves the nuclease target site in the target genomic locus, and the nucleic acid construct is inserted into the target genomic locus. In another aspect, provided are methods of expressing a multidomain therapeutic protein comprising a TfR-binding delivery domain fused to a lysosomal alpha-glucosidase protein in a cell or a population of cells in a subject. Some such methods comprise administering to the subject any of the above compositions, wherein the coding sequence for the multidomain therapeutic protein is operably linked to a promoter in the nucleic acid construct and is expressed in the cell. In another aspect, provided are methods of expressing a multidomain therapeutic protein comprising a TfR-binding delivery domain fused to a lysosomal alpha-glucosidase protein from a target genomic locus in a cell or a population of cells in a subject. Some such methods comprise administering to the subject any of the above compositions, wherein the nuclease agent cleaves the nuclease target site in the target genomic locus, the nucleic acid construct is inserted into the target genomic locus to create a modified target genomic locus, and the multidomain therapeutic protein comprising the TfR-binding delivery domain fused to the lysosomal alpha-glucosidase is expressed from the modified target genomic locus. In some such methods, the expressed multidomain therapeutic protein is delivered to and internalized by skeletal muscle, heart, and central nervous system tissue in the subject. In some such methods, the cell is a liver cell or the population of cells is a population of liver cells. In some such methods, the cell is a hepatocyte or the population of cells is a population of hepatocytes. In some such methods, the cell is a human cell or the population of cells is a population of human cells. In some such methods, the cell is a neonatal cell or the population of cells is a population of neonatal cells. In some such methods, the neonatal cell or the population of neonatal cells is from a human neonatal subject within 24 weeks after birth. In some such methods, the neonatal cell or the population of neonatal cells is from a human neonatal subject within 12 weeks after birth. In some such methods, the neonatal cell or the population of neonatal cells is from a human neonatal subject within 8 weeks after birth. In some such methods, the neonatal cell or the population of neonatal cells is from a human neonatal subject within 4 weeks after birth. In some such methods, the cell is not a neonatal cell or the population of cells is not a population of neonatal cells.

[0106] In another aspect, provided are methods of treating a lysosomal alpha-glucosidase deficiency in a subject in need thereof. Some such methods comprise administering to the subject any of the above compositions, wherein the coding sequence for the multidomain therapeutic protein is operably linked to a promoter in the nucleic acid construct and is expressed in the subject. Some such methods comprise administering to the subject any of the above compositions, wherein the nuclease agent cleaves the nuclease target site in the target genomic locus, the nucleic acid construct is inserted into the target genomic locus to create a modified target genomic locus, and the multidomain therapeutic protein comprising the TfR-binding delivery domain fused to the lysosomal alpha-glucosidase is expressed from the modified target genomic locus. In another aspect, provided are methods of reducing glycogen accumulation in a tissue in a subject in need thereof. Some such methods comprise administering to the subject any of the above compositions, wherein the coding sequence for the multidomain therapeutic protein is operably linked to a promoter in the nucleic acid construct and is expressed in the subject and reduces glycogen accumulation in the tissue. Some such methods comprise administering to the subject any of the above compositions, wherein the nuclease agent cleaves the nuclease target site in the target genomic locus, the nucleic acid construct is inserted into the target genomic locus to create a modified target genomic locus, and the multidomain therapeutic protein comprising the TfR-binding delivery domain fused to the lysosomal alpha-glucosidase is expressed from the modified target genomic locus and reduces glycogen accumulation in the tissue. In some such methods, the subject has Pompe disease. In another aspect, provided are methods of treating Pompe disease in a subject in need thereof. Some such methods comprise administering to the subject any of the above compositions, wherein the coding sequence for the multidomain therapeutic protein is operably linked to a promoter in the nucleic acid construct and is expressed in the subject, thereby treating the Pompe disease. Some such methods comprise administering to the subject any of the above compositions, wherein the nuclease agent cleaves the nuclease target site in the target genomic locus, the nucleic acid construct is inserted into the target genomic locus to create a modified target genomic locus, and the multidomain therapeutic protein comprising the TfR-binding delivery domain fused to the lysosomal alpha-glucosidase is expressed from the modified target genomic locus, thereby treating the Pompe disease. In some such methods, the Pompe disease is infantile-onset Pompe disease. In some such methods, the Pompe disease is late-onset Pompe disease.

[0107] In some such methods, the neonatal subject is a human subject within 24 weeks after birth. In some such methods, the neonatal subject is a human subject within 12 weeks after birth. In some such methods, the neonatal subject is a human subject within 8 weeks after birth. In some such methods, the neonatal subject is a human subject within 4 weeks after birth. In some such methods, the subject is not a neonatal subject.

[0108] In some such methods, the method results in a therapeutically effective level of circulating multidomain therapeutic protein or lysosomal alpha-glucosidase in the subject. In some such methods, the method reduces glycogen accumulation in skeletal muscle, heart, or central nervous system tissue in the subject. In some such methods, the method reduces glycogen accumulation in skeletal muscle, heart, and central nervous system tissue in the subject. In some such methods, the method results in reduced glycogen levels in skeletal muscle, heart, and/or central nervous system tissue in the subject comparable to wild type levels at the same age. In some such methods, the method improves muscle strength in the subject or prevents loss of muscle strength in the subject compared to a control subject. In some such methods, the method results in the subject having muscle strength comparable to wild type levels at the same age.

[0109] In another aspect, provided are methods of preventing or reducing the onset of a sign or symptom of Pompe disease in a neonatal subject in need thereof. Some such methods comprise administering to the neonatal subject any of the above compositions, wherein the coding sequence for the multidomain therapeutic protein is operably linked to a promoter in the nucleic acid construct and is expressed in the subject, thereby preventing or reducing the onset of a sign or symptom of the Pompe disease in the subject. Some such methods comprise administering to the neonatal subject any of the above compositions, wherein the nuclease agent cleaves the nuclease target site, the nucleic acid construct is inserted into the target genomic locus to create a modified target genomic locus, and the multidomain therapeutic protein comprising the TfR-binding delivery domain fused to the lysosomal alpha-glucosidase is expressed from the modified target genomic locus, thereby preventing or reducing the onset of a sign or symptom of the Pompe disease in the subject. In some such methods, the Pompe disease is infantile-onset Pompe disease. In some such methods, the Pompe disease is late-onset Pompe disease. In some such methods, the method results in a therapeutically effective level of circulating multidomain therapeutic protein or lysosomal alpha-glucosidase in the subject. In some such methods, the method prevents or reduces glycogen accumulation in skeletal muscle, heart, or central nervous system tissue in the subject. In some such methods, the method prevents or reduces glycogen accumulation in skeletal muscle, heart, and central nervous system tissue in the subject.

[0110] In some such methods, the subject is a neonatal subject. In some such methods, the neonatal subject is a human subject within 24 weeks after birth. In some such methods, the neonatal subject is a human subject within 12 weeks after birth. In some such methods, the neonatal subject is a human subject within 8 weeks after birth. In some such methods, the neonatal subject is a human subject within 4 weeks after birth. In some such methods, the subject is not a neonatal subject.

[0111] In some such methods, the method results in increased expression of the multidomain therapeutic protein in the subject compared to a method comprising administering an episomal expression vector encoding the multidomain therapeutic protein to a control subject. In some such methods, the method results in increased serum levels of the multidomain therapeutic protein in the subject compared to a method comprising administering an episomal expression vector encoding the multidomain therapeutic protein to a control subject. In some such methods, the method results in serum levels of the multidomain therapeutic protein in the subject of at least about 1 µg/mL, at least about 2 µg/mL, at least about 3 µg/mL, at least about 4 µg/mL, at least about 5 µg/mL, at least about 6 µg/mL, at least about 7 µg/mL, at least about 8 µg/mL, at least about 9 µg/mL, or at least about 10 µg/mL. In some such methods, the method results in serum levels of the multidomain therapeutic protein in the subject of at least about 2 µg/mL or at least about 5 µg/mL. In some such methods, the method results in serum levels of the multidomain therapeutic protein in the subject of between about 2 µg/mL and about 30 µg/mL or between about 2 µg/mL and about 20 µg/mL. In some such methods, the method results in serum levels of the multidomain therapeutic protein in the subject of between about 5 µg/mL and about 30 µg/mL or between about 5 µg/mL and about 20 µg/mL. In some such methods, the method achieves lysosomal alpha-glucosidase activity levels of at least about 40% of normal, at least about 45% of normal, at least about 50%, at least about 60%, at least about 70%, at least about 80%, at least about 90%, or 100% of normal. In some such methods, the subject has infantile-onset Pompe disease, and the method achieves lysosomal alpha-glucosidase expression or activity levels of at least about 1% or more than about 1% of normal. In some such methods, the subject has late-onset Pompe disease, and the method achieves lysosomal alpha-glucosidase expression or activity levels of at least about 40% of normal or more than about 40% of normal. In some such methods, the method increases lysosomal alpha-glucosidase activity over the subject’s baseline lysosomal alpha-glucosidase activity by at least about 1%, at least about 5%, at least about 10%, at least about 15%, at least about 20%, at least about 25%, at least about 30%, at least about 35%, at least about 40%, at least about 45%, at least about 50%, at least about 60%, at least about 70%, at least about 80%, at least about 90%, or at least about 100%. In some such methods, the expression or activity of the multidomain therapeutic protein is at least 50% of the expression or activity of the multidomain therapeutic protein at a peak level of expression measured for the subject at six months or 24 weeks after the administering. In some such methods, the expression or activity of the multidomain therapeutic protein is at least 50% of the expression or activity of the multidomain therapeutic protein at a peak level of expression measured for the subject at one year after the administering. In some such methods, the expression or activity of the multidomain therapeutic protein is at least 60% of the expression or activity of the multidomain therapeutic protein at a peak level of expression measured for the subject at six months or 24 weeks after the administering. In some such methods, the expression or activity of the multidomain therapeutic protein is at least 50% of the expression or activity of the multidomain therapeutic protein at a peak level of expression measured for the subject at two years after the administering. In some such methods, the expression or activity of the multidomain therapeutic protein is at least 60% of the expression or activity of the multidomain therapeutic protein at a peak level of expression measured for the subject at two years after the administering. In some such methods, the expression or activity of the multidomain therapeutic protein is at least 60% of the expression or activity of the multidomain therapeutic protein at a peak level of expression measured for the subject at six months or 24 weeks after the administering.

[0112] In some such methods, the method further comprises assessing preexisting AAV immunity in the subject prior to administering the nucleic acid construct to the subject. In some such methods, the preexisting AAV immunity is preexisting AAV8 immunity. In some such methods, assessing preexisting AAV immunity comprises assessing immunogenicity using a total antibody immune assay or a neutralizing antibody assay.

[0113] In some such methods, the nucleic acid construct is administered simultaneously with the nuclease agent or the one or more nucleic acids encoding the nuclease agent. In some such methods, the nucleic acid construct is not administered simultaneously with the nuclease agent or the one or more nucleic acids encoding the nuclease agent. In some such methods, the nucleic acid construct is administered prior to the nuclease agent or the one or more nucleic acids encoding the nuclease agent. In some such methods, the nucleic acid construct is administered after the nuclease agent or the one or more nucleic acids encoding the nuclease agent. In some such methods, the subject is a human subject. In some such methods, the subject is a neonatal subject. In some such methods, the neonatal subject is a human subject within 24 weeks after birth. In some such methods, the neonatal subject is a human subject within 12 weeks after birth. In some such methods, the neonatal subject is a human subject within 8 weeks after birth. In some such methods, the neonatal subject is a human subject within 4 weeks after birth. In some such methods, the subject is not a neonatal subject.

[0114] In another aspect, provided are compositions comprising a nucleic acid construct comprising a coding sequence for lysosomal alpha-glucosidase, wherein the lysosomal alpha-glucosidase coding sequence is CpG-depleted relative to a wild type lysosomal alpha-glucosidase coding sequence. In some such compositions, the lysosomal alpha-glucosidase lacks the lysosomal alpha-glucosidase signal peptide and propeptide. In some such compositions, the lysosomal alpha-glucosidase comprises the sequence set forth in SEQ ID NO: 173. In some such compositions, the lysosomal alpha-glucosidase consists of the sequence set forth in SEQ ID NO: 173. In some such compositions, the lysosomal alpha-glucosidase coding sequence is codon-optimized and CpG-depleted. In some such compositions, the lysosomal alpha-glucosidase coding sequence is at least 90%, at least 91%, at least 92%, at least 93%, at least 94%, at least 95%, at least 96%, at least 97%, at least 98%, or at least 99% identical to any one of SEQ ID NOS: 174-182 and 205-212, optionally wherein the lysosomal alpha-glucosidase coding sequence is at least 90%, at least 91%, at least 92%, at least 93%, at least 94%, at least 95%, at least 96%, at least 97%, at least 98%, or at least 99% identical to SEQ ID NO: 176. In some such compositions, the lysosomal alpha-glucosidase coding sequence is at least 90%, at least 91%, at least 92%, at least 93%, at least 94%, at least 95%, at least 96%, at least 97%, at least 98%, or at least 99% identical to any one of SEQ ID NOS: 174-182 and 205-212 and encodes a lysosomal alpha-glucosidase protein comprising SEQ ID NO: 173, optionally wherein the lysosomal alpha-glucosidase coding sequence is at least 90%, at least 91%, at least 92%, at least 93%, at least 94%, at least 95%, at least 96%, at least 97%, at least 98%, or at least 99% identical to SEQ ID NO: 176 and encodes a lysosomal alpha-glucosidase protein comprising SEQ ID NO: 173. In some such compositions, the lysosomal alpha-glucosidase coding sequence is at least 90%, at least 91%, at least 92%, at least 93%, at least 94%, at least 95%, at least 96%, at least 97%, at least 98%, or at least 99% identical to any one of SEQ ID NOS: 174-182 and 205-212, is codon-optimized and CpG-depleted, and encodes a lysosomal alpha-glucosidase protein comprising SEQ ID NO: 173, optionally wherein the lysosomal alpha-glucosidase coding sequence is at least 90%, at least 91%, at least 92%, at least 93%, at least 94%, at least 95%, at least 96%, at least 97%, at least 98%, or at least 99% identical to SEQ ID NO: 176, is codon-optimized and CpG-depleted, and encodes a lysosomal alpha-glucosidase protein comprising SEQ ID NO: 173. In some such compositions, the lysosomal alpha-glucosidase coding sequence comprises the sequence set forth in any one of SEQ ID NOS: 174-182 and 205-212, optionally wherein the lysosomal alpha-glucosidase coding sequence comprises the sequence set forth in SEQ ID NO: 176. In some such compositions, the lysosomal alpha-glucosidase coding sequence consists of the sequence set forth in any one of SEQ ID NOS: 174-182 and 205-212, optionally wherein the lysosomal alpha-glucosidase coding sequence consists of the sequence set forth in SEQ ID NO: 176.

[0115] In some such compositions, the nucleic acid construct comprises a splice acceptor upstream of the lysosomal alpha-glucosidase coding sequence. In some such compositions, the nucleic acid construct comprises a polyadenylation signal or sequence downstream of the lysosomal alpha-glucosidase coding sequence. In some such compositions, the nucleic acid construct comprises a splice acceptor upstream of the lysosomal alpha-glucosidase coding sequence, and the nucleic acid construct comprises a polyadenylation signal or sequence downstream of the lysosomal alpha-glucosidase coding sequence. In some such compositions, the nucleic acid construct does not comprise a homology arm. In some such compositions, the nucleic acid construct comprises homology arms. In some such compositions, the nucleic acid construct does not comprise a promoter that drives the expression of the lysosomal alpha-glucosidase. In some such compositions, the lysosomal alpha-glucosidase coding sequence is operably linked to a promoter, optionally wherein the promoter is a liver-specific promoter. In some such compositions, the nucleic acid construct is single-stranded DNA or double-stranded DNA. In some such compositions, the nucleic acid construct is single-stranded DNA.

[0116] In some such compositions, the nucleic acid construct comprises from 5′ to 3′: a splice acceptor, the lysosomal alpha-glucosidase coding sequence, and a polyadenylation signal or sequence, wherein the lysosomal alpha-glucosidase coding sequence comprises any one of SEQ ID NOS: 174-182 and 205-212, optionally wherein the lysosomal alpha-glucosidase coding sequence comprises SEQ ID NO: 176, wherein the nucleic acid construct does not comprise a promoter that drives the expression of the lysosomal alpha-glucosidase, and wherein the nucleic acid construct does not comprise a homology arm.

[0117] In some such compositions, the nucleic acid construct is in a nucleic acid vector or a lipid nanoparticle. In some such compositions, the nucleic acid construct is in the nucleic acid vector. In some such compositions, the nucleic acid vector is a viral vector. In some such compositions, the nucleic acid vector is an adeno-associated viral (AAV) vector, optionally wherein the nucleic acid construct is flanked by inverted terminal repeats (ITRs) on each end, optionally wherein the ITR on at least one end comprises, consists essentially of, or consists of SEQ ID NO: 160, and optionally wherein the ITR on each end comprises, consists essentially of, or consists of SEQ ID NO: 160. In some such compositions, the AAV vector is a single-stranded AAV (ssAAV) vector. In some such compositions, the AAV vector is derived from an AAV8 vector, an AAV3B vector, an AAV5 vector, an AAV6 vector, an AAV7 vector, an AAV9 vector, an AAVrh.74 vector, or an AAVhu.37 vector. In some such compositions, the AAV vector is a recombinant AAV8 (rAAV8) vector. In some such compositions, the AAV vector is a single-stranded rAAV8 vector.

[0118] In some such compositions, the nucleic acid construct comprises from 5′ to 3′: a splice acceptor, the lysosomal alpha-glucosidase coding sequence, and a polyadenylation signal or sequence, wherein the lysosomal alpha-glucosidase coding sequence comprises any one of SEQ ID NOS: 174-182 and 205-212, optionally wherein the lysosomal alpha-glucosidase coding sequence comprises SEQ ID NO: 176, wherein the nucleic acid construct does not comprise a promoter that drives the expression of the lysosomal alpha-glucosidase, wherein the nucleic acid construct does not comprise a homology arm, and wherein the nucleic acid construct is in a single-stranded rAAV8 vector, optionally wherein the nucleic acid construct is flanked by inverted terminal repeats (ITRs) on each end, optionally wherein the ITR on at least one end comprises, consists essentially of, or consists of SEQ ID NO: 160, and optionally wherein the ITR on each end comprises, consists essentially of, or consists of SEQ ID NO: 160. In some such compositions, the nucleic acid construct is CpG-depleted.

[0119] Some such compositions further comprise a nuclease agent that targets a nuclease target site in a target genomic locus. In some such compositions, the target genomic locus is an albumin gene, optionally wherein the albumin gene is a human albumin gene. In some such compositions, the nuclease target site is in intron 1 of the albumin gene. In some such compositions, the nuclease agent comprises: (a) a zinc finger nuclease (ZFN); (b) a transcription activator-like effector nuclease (TALEN); or (c) (i) a Cas protein or a nucleic acid encoding the Cas protein; and (ii) a guide RNA or one or more DNAs encoding the guide RNA, wherein the guide RNA comprises a DNA-targeting segment that targets a guide RNA target sequence, and wherein the guide RNA binds to the Cas protein and targets the Cas protein to the guide RNA target sequence.

[0120] In some such compositions, the nuclease agent comprises: (a) a Cas protein or a nucleic acid encoding the Cas protein; and (b) a guide RNA or one or more DNAs encoding the guide RNA, wherein the guide RNA comprises a DNA-targeting segment that targets a guide RNA target sequence, and wherein the guide RNA binds to the Cas protein and targets the Cas protein to the guide RNA target sequence. In some such compositions, the guide RNA target sequence is in intron 1 of an albumin gene. In some such compositions, the albumin gene is a human albumin gene. In some such compositions: (I) the DNA-targeting segment comprises at least 17, at least 18, at least 19, or at least 20 contiguous nucleotides of the sequence set forth in any one of SEQ ID NOS: 30-61, optionally wherein the DNA-targeting segment comprises at least 17, at least 18, at least 19, or at least 20 contiguous nucleotides of the sequence set forth in any one of SEQ ID NOS: 36, 30, 33, and 41; and/or (II) the DNA-targeting segment is at least 90% or at least 95% identical to the sequence set forth in any one of SEQ ID NOS: 30-61, optionally wherein the DNA-targeting segment is at least 90% or at least 95% identical to the sequence set forth in any one of SEQ ID NOS: 36, 30, 33, and 41. In some such compositions, the DNA-targeting segment comprises any one of SEQ ID NOS: 30-61, optionally wherein the DNA-targeting segment comprises any one of SEQ ID NOS: 36, 30, 33, and 41. In some such compositions, the DNA-targeting segment consists of any one of SEQ ID NOS: 30-61, optionally wherein the DNA-targeting segment consists of any one of SEQ ID NOS: 36, 30, 33, and 41. In some such compositions, the guide RNA comprises any one of SEQ ID NOS: 62-125, optionally wherein the guide RNA comprises any one of SEQ ID NOS: 68, 100, 62, 94, 65, 97, 73, and 105. In some such compositions: (I) the DNA-targeting segment comprises at least 17, at least 18, at least 19, or at least 20 contiguous nucleotides of SEQ ID NO: 36; and/or (II) the DNA-targeting segment is at least 90% or at least 95% identical to SEQ ID NO: 36. In some such compositions, the DNA-targeting segment comprises SEQ ID NO: 36. In some such compositions, the DNA-targeting segment consists of SEQ ID NO: 36. In some such compositions, the guide RNA comprises SEQ ID NO: 68 or 100.

[0121] In some such compositions, the guide RNA in the form of RNA. In some such compositions, the guide RNA comprises at least one modification. In some such compositions, the at least one modification comprises a 2′-O-methyl-modified nucleotide. In some such compositions, the at least one modification comprises a phosphorothioate bond between nucleotides. In some such compositions, the at least one modification comprises a modification at one or more of the first five nucleotides at the 5′ end of the guide RNA. In some such compositions, the at least one modification comprises a modification at one or more of the last five nucleotides at the 3′ end of the guide RNA. In some such compositions, the at least one modification comprises phosphorothioate bonds between the first four nucleotides at the 5′ end of the guide RNA. In some such compositions, the at least one modification comprises phosphorothioate bonds between the last four nucleotides at the 3′ end of the guide RNA. In some such compositions, the at least one modification comprises 2′-O-methyl-modified nucleotides at the first three nucleotides at the 5′ end of the guide RNA. In some such compositions, the at least one modification comprises 2′-O-methyl-modified nucleotides at the last three nucleotides at the 3′ end of the guide RNA. In some such compositions, the at least one modification comprises: (i) phosphorothioate bonds between the first four nucleotides at the 5′ end of the guide RNA; (ii) phosphorothioate bonds between the last four nucleotides at the 3′ end of the guide RNA; (iii) 2′-O-methyl-modified nucleotides at the first three nucleotides at the 5′ end of the guide RNA; and (iv) 2′-O-methyl-modified nucleotides at the last three nucleotides at the 3′ end of the guide RNA. In some such compositions, the guide RNA is a single guide RNA (sgRNA). In some such compositions, the guide RNA in the form of RNA, the guide RNA comprises SEQ ID NO: 100, and the guide RNA comprises: (i) phosphorothioate bonds between the first four nucleotides at the 5′ end of the guide RNA; (ii) phosphorothioate bonds between the last four nucleotides at the 3′ end of the guide RNA; (iii) 2′-O-methyl-modified nucleotides at the first three nucleotides at the 5′ end of the guide RNA; and (iv) 2′-O-methyl-modified nucleotides at the last three nucleotides at the 3′ end of the guide RNA.

[0122] In some such compositions, the Cas protein is a Cas9 protein. In some such compositions, the Cas9 protein is derived from a Streptococcus pyogenes Cas9 protein, a Staphylococcus aureus Cas9 protein, a Campylobacter jejuni Cas9 protein, a Streptococcus thermophilus Cas9 protein, or a Neisseria meningitidis Cas9 protein. In some such compositions, the Cas protein is derived from a Streptococcus pyogenes Cas9 protein. In some such compositions, the Cas protein comprises the sequence set forth in SEQ ID NO: 11. In some such compositions, the nucleic acid encoding the Cas protein is codon-optimized for expression in a mammalian cell or a human cell. In some such compositions, the composition comprises the nucleic acid encoding the Cas protein, wherein the nucleic acid comprises an mRNA encoding the Cas protein. In some such compositions, the mRNA encoding the Cas protein comprises at least one modification. In some such compositions, the mRNA encoding the Cas protein is modified to comprise a modified uridine at one or more or all uridine positions. In some such compositions, the modified uridine is pseudouridine or N1-methyl-pseudouridine, optionally N1-methyl-pseudouridine. In some such compositions, the mRNA encoding the Cas protein is fully substituted with pseudouridine or N1-methyl-pseudouridine, optionally N1-methyl-pseudouridine. In some such compositions, the mRNA encoding the Cas protein comprises a 5′ cap. In some such compositions, the mRNA encoding the Cas protein comprises a polyadenylation sequence. In some such compositions, the mRNA encoding the Cas protein comprises the sequence set forth in SEQ ID NO: 226, 225, or 12.

[0123] In some such compositions, the composition comprises the nucleic acid encoding the Cas protein, wherein the nucleic acid comprises an mRNA encoding the Cas protein, the mRNA encoding the Cas protein comprises the sequence set forth in SEQ ID NO: 226, 225, or 12, and the mRNA encoding the Cas protein is fully substituted with pseudouridine or N1-methyl-pseudouridine, optionally N1-methyl-pseudouridine, comprises a 5′ cap, and comprises a polyadenylation sequence. In some such compositions, the guide RNA in the form of RNA, and the guide RNA comprises SEQ ID NO: 68 or 100, and wherein the composition comprises the nucleic acid encoding the Cas protein, wherein the nucleic acid comprises an mRNA encoding the Cas protein, and the mRNA encoding the Cas protein comprises the sequence set forth in SEQ ID NO: 226, 225, or 12. In some such compositions, the nucleic acid construct comprises from 5′ to 3′: a splice acceptor, the lysosomal alpha-glucosidase coding sequence, and a polyadenylation signal or sequence, wherein the lysosomal alpha-glucosidase coding sequence comprises any one of SEQ ID NOS: 174-182 and 205-212, optionally wherein the lysosomal alpha-glucosidase coding sequence comprises SEQ ID NO: 176, wherein the nucleic acid construct does not comprise a promoter that drives the expression of the lysosomal alpha-glucosidase, wherein the nucleic acid construct does not comprise a homology arm, and wherein the nucleic acid construct is in a single-stranded rAAV8 vector, optionally wherein the nucleic acid construct is flanked by inverted terminal repeats (ITRs) on each end, optionally wherein the ITR on at least one end comprises, consists essentially of, or consists of SEQ ID NO: 160, and optionally wherein the ITR on each end comprises, consists essentially of, or consists of SEQ ID NO: 160.

[0124] In some such compositions, the guide RNA in the form of RNA, the guide RNA comprises SEQ ID NO: 100, and the guide RNA comprises: (i) phosphorothioate bonds between the first four nucleotides at the 5′ end of the guide RNA; (ii) phosphorothioate bonds between the last four nucleotides at the 3′ end of the guide RNA; (iii) 2′-O-methyl-modified nucleotides at the first three nucleotides at the 5′ end of the guide RNA; and (iv) 2′-O-methyl-modified nucleotides at the last three nucleotides at the 3′ end of the guide RNA, and wherein the composition comprises the nucleic acid encoding the Cas protein, wherein the nucleic acid comprises an mRNA encoding the Cas protein, the mRNA encoding the Cas protein comprises the sequence set forth in SEQ ID NO: 226, 225, or 12, and the mRNA encoding the Cas protein is fully substituted with pseudouridine or N1-methyl-pseudouridine, optionally N1-methyl-pseudouridine, comprises a 5′ cap, and comprises a polyadenylation sequence. In some such compositions, the nucleic acid construct comprises from 5′ to 3′: a splice acceptor, the lysosomal alpha-glucosidase coding sequence, and a polyadenylation signal or sequence, wherein the lysosomal alpha-glucosidase coding sequence comprises any one of SEQ ID NOS: 174-182 and 205-212, optionally wherein the lysosomal alpha-glucosidase coding sequence comprises SEQ ID NO: 176, wherein the nucleic acid construct does not comprise a promoter that drives the expression of the lysosomal alpha-glucosidase, wherein the nucleic acid construct does not comprise a homology arm, and wherein the nucleic acid construct is in a single-stranded rAAV8 vector, optionally wherein the nucleic acid construct is flanked by inverted terminal repeats (ITRs) on each end, optionally wherein the ITR on at least one end comprises, consists essentially of, or consists of SEQ ID NO: 160, and optionally wherein the ITR on each end comprises, consists essentially of, or consists of SEQ ID NO: 160.

[0125] In some such compositions, the Cas protein or the nucleic acid encoding the Cas protein and the guide RNA or the one or more DNAs encoding the guide RNA are associated with a lipid nanoparticle. In some such compositions, the lipid nanoparticle comprises a cationic lipid, a neutral lipid, a helper lipid, and a stealth lipid. In some such compositions, the cationic lipid is Lipid A ((9Z,12Z)-3-((4,4-bis(octyloxy)butanoyl)oxy)-2-((((3-(diethylamino)propoxy)carbonyl)oxy)methyl)propyl octadeca-9,12-dienoate). In some such compositions, the neutral lipid is distearoylphosphatidylcholine or 1,2-distearoyl-sn-glycero-3-phosphocholine (DSPC). In some such compositions, the helper lipid is cholesterol. In some such compositions, the stealth lipid is 1,2-dimyristoyl-rac-glycero-3-methoxypolyethylene glycol-2000 (PEG2k-DMG). In some such compositions, the cationic lipid is Lipid A, the neutral lipid is DSPC, the helper lipid is cholesterol, and the stealth lipid is PEG2k-DMG. In some such compositions, the lipid nanoparticle comprises four lipids at the following molar ratios: about 50 mol% Lipid A, about 9 mol% DSPC, about 38 mol% cholesterol, and about 3 mol% PEG2k-DMG.

[0126] In some such compositions, the albumin gene is a human albumin gene, wherein the guide RNA in the form of RNA, and the guide RNA comprises SEQ ID NO: 68 or 100, wherein the composition comprises the nucleic acid encoding the Cas protein, wherein the nucleic acid comprises an mRNA encoding the Cas protein, and the mRNA encoding the Cas protein comprises the sequence set forth in SEQ ID NO: 226, 225, or 12, and wherein the guide RNA and the mRNA encoding the Cas protein are associated with a lipid nanoparticle comprising Lipid A, DSPC, cholesterol, and PEG2k-DMG, optionally at the following molar ratios: about 50 mol% Lipid A, about 9 mol% DSPC, about 38 mol% cholesterol, and about 3 mol% PEG2k-DMG. In some such compositions, the nucleic acid construct comprises from 5′ to 3′: a splice acceptor, the lysosomal alpha-glucosidase coding sequence, and a polyadenylation signal or sequence, wherein the lysosomal alpha-glucosidase coding sequence comprises any one of SEQ ID NOS: 174-182 and 205-212, optionally wherein the lysosomal alpha-glucosidase coding sequence comprises SEQ ID NO: 176, wherein the nucleic acid construct does not comprise a promoter that drives the expression of the lysosomal alpha-glucosidase, wherein the nucleic acid construct does not comprise a homology arm, and wherein the nucleic acid construct is in a single-stranded rAAV8 vector, optionally wherein the nucleic acid construct is flanked by inverted terminal repeats (ITRs) on each end, optionally wherein the ITR on at least one end comprises, consists essentially of, or consists of SEQ ID NO: 160, and optionally wherein the ITR on each end comprises, consists essentially of, or consists of SEQ ID NO: 160.

[0127] In some such compositions, the albumin gene is a human albumin gene, wherein the guide RNA in the form of RNA, the guide RNA comprises SEQ ID NO: 100, and the guide RNA comprises: (i) phosphorothioate bonds between the first four nucleotides at the 5′ end of the guide RNA; (ii) phosphorothioate bonds between the last four nucleotides at the 3′ end of the guide RNA; (iii) 2′-O-methyl-modified nucleotides at the first three nucleotides at the 5′ end of the guide RNA; and (iv) 2′-O-methyl-modified nucleotides at the last three nucleotides at the 3′ end of the guide RNA, wherein the composition comprises the nucleic acid encoding the Cas protein, wherein the nucleic acid comprises an mRNA encoding the Cas protein, the mRNA encoding the Cas protein comprises the sequence set forth in SEQ ID NO: 226, 225, or 12, and the mRNA encoding the Cas protein is fully substituted with pseudouridine or N1-methyl-pseudouridine, optionally N1-methyl-pseudouridine, comprises a 5′ cap, and comprises a polyadenylation sequence, and wherein the guide RNA and the mRNA encoding the Cas protein are associated with a lipid nanoparticle comprising Lipid A, DSPC, cholesterol, and PEG2k-DMG, optionally at the following molar ratios: about 50 mol% Lipid A, about 9 mol% DSPC, about 38 mol% cholesterol, and about 3 mol% PEG2k-DMG. In some such compositions, the nucleic acid construct comprises from 5′ to 3′: a splice acceptor, the lysosomal alpha-glucosidase coding sequence, and a polyadenylation signal or sequence, wherein the lysosomal alpha-glucosidase coding sequence comprises any one of SEQ ID NOS: 174-182 and 205-212, optionally wherein the lysosomal alpha-glucosidase coding sequence comprises SEQ ID NO: 176, wherein the nucleic acid construct does not comprise a promoter that drives the expression of the lysosomal alpha-glucosidase, wherein the nucleic acid construct does not comprise a homology arm, and wherein the nucleic acid construct is in a single-stranded rAAV8 vector, optionally wherein the nucleic acid construct is flanked by inverted terminal repeats (ITRs) on each end, optionally wherein the ITR on at least one end comprises, consists essentially of, or consists of SEQ ID NO: 160, and optionally wherein the ITR on each end comprises, consists essentially of, or consists of SEQ ID NO: 160.

[0128] Some such compositions are for use in a method of inserting the lysosomal alpha-glucosidase coding sequence into a target genomic locus in a cell or a population of cells. Some such compositions are for use in a method of expressing the lysosomal alpha-glucosidase from a target genomic locus in a cell or a population of cells. Some such compositions are for use in a method of expressing the lysosomal alpha-glucosidase in a cell or a population of cells. Some such compositions are for use in a method of inserting the lysosomal alpha-glucosidase coding sequence into a target genomic locus in a cell or a population of cells in a subject. Some such compositions are for use in a method of expressing the lysosomal alpha-glucosidase from a target genomic locus in a cell or a population of cells in a subject. Some such compositions are for use in a method of expressing the lysosomal alpha-glucosidase in a cell or a population of cells in a subject. Some such compositions are for use in a method of treating a lysosomal alpha-glucosidase deficiency in a subject in need thereof. Some such compositions are for use in a method of reducing glycogen accumulation in a tissue in a subject in need thereof. Some such compositions are for use in a method of treating Pompe disease in a subject in need thereof. Some such compositions are for use in a method of preventing or reducing the onset of a sign or symptom of Pompe disease in a neonatal subject in need thereof.

[0129] In another aspect, provided are cells comprising any of the above compositions. In some such cells, the nucleic acid construct is integrated into a target genomic locus, and wherein the lysosomal alpha-glucosidase is expressed from the target genomic locus, or wherein the nucleic acid construct is integrated into intron 1 of an endogenous albumin locus, and wherein the lysosomal alpha-glucosidase is expressed from the endogenous albumin locus. In some such cells, the cell is a liver cell. In some such cells, the liver cell is a hepatocyte. In some such cells, the cell is a human cell. In some such cells, the cell is a neonatal cell. In some such cells, the neonatal cell is from a human neonatal subject within 24 weeks after birth. In some such cells, the neonatal cell is from a human neonatal subject within 12 weeks after birth. In some such cells, the neonatal cell is from a human neonatal subject within 8 weeks after birth. In some such cells, the neonatal cell is from a human neonatal subject within 4 weeks after birth. In some such cells, the cell is not a neonatal cell. In some such cells, the cell is in vivo. In some such cells, the cell is in vitro or ex vivo.

[0130] In another aspect, provided are methods of inserting a lysosomal alpha-glucosidase coding sequence into a target genomic locus in a cell or a population of cells. Some such methods comprise administering to the cell or the population of cells any of the above compositions, wherein the nuclease agent cleaves the nuclease target site in the target genomic locus, and the nucleic acid construct is inserted into the target genomic locus. In another aspect, provided are methods of expressing a lysosomal alpha-glucosidase in a cell or a population of cells. Some such methods comprise administering to the cell or the population of cells any of the above compositions, wherein the lysosomal alpha-glucosidase coding sequence is operably linked to a promoter in the nucleic acid construct and is expressed in the cell or population of cells. In another aspect, provided are methods of expressing a lysosomal alpha-glucosidase from a target genomic locus in a cell or a population of cells. Some such methods comprise administering to the cell or the population of cells any of the above compositions, wherein the nuclease agent cleaves the nuclease target site in the target genomic locus, the nucleic acid construct is inserted into the target genomic locus to create a modified target genomic locus, and the lysosomal alpha-glucosidase is expressed from the modified target genomic locus. In some such methods, the cell is a liver cell or the population of cells is a population of liver cells. In some such methods, the cell is a hepatocyte or the population of cells is a population of hepatocytes. In some such methods, the cell is a human cell or the population of cells is a population of human cells. In some such methods, the cell is a neonatal cell or the population of cells is a population of neonatal cells. In some such methods, the neonatal cell or the population of neonatal cells is from a human neonatal subject within 24 weeks after birth. In some such methods, the neonatal cell or the population of neonatal cells is from a human neonatal subject within 12 weeks after birth. In some such methods, the neonatal cell or the population of neonatal cells is from a human neonatal subject within 8 weeks after birth. In some such methods, the neonatal cell or the population of neonatal cells is from a human neonatal subject within 4 weeks after birth. In some such methods, the cell is not a neonatal cell or the population of cells is not a population of neonatal cells. In some such methods, the cell is in vitro or ex vivo or the population of cells is in vitro or ex vivo. In some such methods, the cell is in vivo in a subject or the population of cells is in vivo in a subject.

[0131] In another aspect, provided are methods of inserting a lysosomal alpha-glucosidase coding sequence into a target genomic locus in a cell in a subject. Some such methods comprise administering to the subject any of the above compositions, wherein the nuclease agent cleaves the nuclease target site in the target genomic locus, and the nucleic acid construct is inserted into the target genomic locus. In another aspect, provided are methods of expressing a lysosomal alpha-glucosidase in a cell in a subject. Some such methods comprise administering to the subject any of the above compositions, wherein the lysosomal alpha-glucosidase coding sequence is operably linked to a promoter in the nucleic acid construct and is expressed in the cell. In another aspect, provided are methods of expressing a lysosomal alpha-glucosidase from a target genomic locus in a cell in a subject. Some such methods comprise administering to the subject any of the above compositions, wherein the nuclease agent cleaves the nuclease target site in the target genomic locus, the nucleic acid construct is inserted into the target genomic locus to create a modified target genomic locus, and the lysosomal alpha-glucosidase is expressed from the modified target genomic locus. In some such methods, the cell is a liver cell. In some such methods, the cell is a hepatocyte. In some such methods, the cell is a human cell. In some such methods, the cell is a neonatal cell. In some such methods, the neonatal subject is a human subject within 24 weeks after birth. In some such methods, the neonatal subject is a human subject within 12 weeks after birth. In some such methods, the neonatal subject is a human subject within 8 weeks after birth. In some such methods, the neonatal subject is a human subject within 4 weeks after birth. In some such methods, the cell is not a neonatal cell.

[0132] In another aspect, provided are methods of treating a lysosomal alpha-glucosidase deficiency in a subject in need thereof. Some such methods comprise administering to the subject any of the above compositions, wherein the lysosomal alpha-glucosidase coding sequence is operably linked to a promoter in the nucleic acid construct and is expressed in the subject. Some such methods comprise administering to the subject any of the above compositions, wherein the nuclease agent cleaves the nuclease target site in the target genomic locus, the nucleic acid construct is inserted into the target genomic locus to create a modified target genomic locus, and the lysosomal alpha-glucosidase is expressed from the modified target genomic locus. In another aspect, provided are methods of reducing glycogen accumulation in a tissue in a subject in need thereof. Some such methods comprise administering to the subject any of the above compositions, wherein the lysosomal alpha-glucosidase coding sequence is operably linked to a promoter in the nucleic acid construct and is expressed in the subject and reduces glycogen accumulation in the tissue. Some such methods comprise administering to the subject any of the above compositions, wherein the nuclease agent cleaves the nuclease target site in the target genomic locus, the nucleic acid construct is inserted into the target genomic locus to create a modified target genomic locus, and the lysosomal alpha-glucosidase is expressed from the modified target genomic locus and reduces glycogen accumulation in the tissue. In some such methods, the subject has Pompe disease. In another aspect, provided are methods of treating Pompe disease in a subject in need thereof. Some such methods comprise administering to the subject any of the above compositions, wherein the lysosomal alpha-glucosidase coding sequence is operably linked to a promoter in the nucleic acid construct and is expressed in the subject, thereby treating the Pompe disease. Some such methods comprise administering to the subject any of the above compositions, wherein the nuclease agent cleaves the nuclease target site in the target genomic locus, the nucleic acid construct is inserted into the target genomic locus to create a modified target genomic locus, and the lysosomal alpha-glucosidase is expressed from the modified target genomic locus, thereby treating the Pompe disease. In some such methods, the Pompe disease is infantile-onset Pompe disease. In some such methods, the Pompe disease is late-onset Pompe disease.

[0133] In some such methods, the subject is a human subject. In some such methods, the subject is a neonatal subject. In some such methods, the neonatal subject is a human subject within 24 weeks after birth. In some such methods, the neonatal subject is a human subject within 12 weeks after birth. In some such methods, the neonatal subject is a human subject within 8 weeks after birth. In some such methods, the neonatal subject is a human subject within 4 weeks after birth. In some such methods, the subject is not a neonatal subject.

[0134] In some such methods, the method results in a therapeutically effective level of circulating lysosomal alpha-glucosidase in the subject. In some such methods, the method reduces glycogen accumulation in skeletal muscle, heart tissue, or central nervous system tissue in the subject. In some such methods, the method reduces glycogen accumulation in skeletal muscle and heart tissue in the subject. In some such methods, the method results in reduced glycogen levels in skeletal muscle and heart tissue in the subject comparable to wild type levels at the same age. In some such methods, the method improves muscle strength in the subject or prevents loss of muscle strength in the subject compared to a control subject. In some such methods, the method results in the subject having muscle strength comparable to wild type levels at the same age.

[0135] In another aspect, provided are methods of preventing or reducing the onset of a sign or symptom of Pompe disease in a subject in need thereof. Some such methods comprise administering to the subject any of the above compositions, wherein the lysosomal alpha-glucosidase coding sequence is operably linked to a promoter in the nucleic acid construct and is expressed in the subject, thereby preventing or reducing the onset of a sign or symptom of the Pompe disease in the subject. Some such methods comprise administering to the subject any of the above compositions, wherein the nuclease agent cleaves the nuclease target site, the nucleic acid construct is inserted into the target genomic locus to create a modified target genomic locus, and the lysosomal alpha-glucosidase is expressed from the modified target genomic locus, thereby preventing or reducing the onset of a sign or symptom of the Pompe disease in the subject. In some such methods, the Pompe disease is infantile-onset Pompe disease. In some such methods, the Pompe disease is late-onset Pompe disease.

[0136] In some such methods, the method results in a therapeutically effective level of circulating lysosomal alpha-glucosidase in the subject. In some such methods, the method prevents or reduces glycogen accumulation in skeletal muscle, heart, or central nervous system tissue in the subject. In some such methods, the method prevents or reduces glycogen accumulation in skeletal muscle and heart tissue in the subject.

[0137] In some such methods, the subject is a human subject. In some such methods, the subject is a neonatal subject. In some such methods, the neonatal subject is a human subject within 24 weeks after birth. In some such methods, the neonatal subject is a human subject within 12 weeks after birth. In some such methods, the neonatal subject is a human subject within 8 weeks after birth. In some such methods, the neonatal subject is a human subject within 4 weeks after birth. In some such methods, the subject is not a neonatal subject.

[0138] In some such methods, the method results in increased expression of lysosomal alpha-glucosidase in the subject compared to a method comprising administering an episomal expression vector encoding the lysosomal alpha-glucosidase to a control subject. In some such methods, the method results in increased serum levels of the lysosomal alpha-glucosidase in the subject compared to a method comprising administering an episomal expression vector encoding the lysosomal alpha-glucosidase to a control subject. In some such methods, the method results in serum levels of the lysosomal alpha-glucosidase in the subject of at least about 1 µg/mL, at least about 2 µg/mL, at least about 3 µg/mL, at least about 4 µg/mL, at least about 5 µg/mL, at least about 6 µg/mL, at least about 7 µg/mL, at least about 8 µg/mL, at least about 9 µg/mL, or at least about 10 µg/mL. In some such methods, the method results in serum levels of the lysosomal alpha-glucosidase in the subject of at least about 2 µg/mL or at least about 5 µg/mL. In some such methods, the method results in serum levels of the lysosomal alpha-glucosidase in the subject of between about 2 µg/mL and about 30 µg/mL or between about 2 µg/mL and about 20 µg/mL. In some such methods, the method results in serum levels of the lysosomal alpha-glucosidase in the subject of between about 5 µg/mL and about 30 µg/mL or between about 5 µg/mL and about 20 µg/mL. In some such methods, the method achieves lysosomal alpha-glucosidase activity levels of at least about 40% of normal, at least about 45% of normal, at least about 50%, at least about 60%, at least about 70%, at least about 80%, at least about 90%, or 100% of normal. In some such methods: (I) the subject has infantile-onset Pompe disease, and the method achieves lysosomal alpha-glucosidase expression or activity levels of at least about 1% or more than about 1% of normal; or (II) the subject has late-onset Pompe disease, and the method achieves lysosomal alpha-glucosidase expression or activity levels of at least about 40% of normal or more than about 40% of normal. In some such methods, the expression or activity of the lysosomal alpha-glucosidase is at least 50% of the expression or activity of the lysosomal alpha-glucosidase at a peak level of expression measured for the subject at 24 weeks after the administering. In some such methods, the expression or activity of the lysosomal alpha-glucosidase is at least 50% of the expression or activity of the lysosomal alpha-glucosidase at a peak level of expression measured for the subject at one year after the administering. In some such methods, the expression or activity of the lysosomal alpha-glucosidase is at least 60% of the expression or activity of the lysosomal alpha-glucosidase at a peak level of expression measured for the subject at 24 weeks after the administering. In some such methods, the expression or activity of the lysosomal alpha-glucosidase is at least 50% of the expression or activity of the lysosomal alpha-glucosidase at a peak level of expression measured for the subject at two years after the administering. In some such methods, the expression or activity of the lysosomal alpha-glucosidase is at least 60% of the expression or activity of the lysosomal alpha-glucosidase at a peak level of expression measured for the subject at 2 years after the administering. In some such methods, the expression or activity of the lysosomal alpha-glucosidase is at least 60% of the expression or activity of the lysosomal alpha-glucosidase at a peak level of expression measured for the subject at 24 weeks after the administering.

[0139] In some such methods, the method further comprises assessing preexisting AAV immunity in the subject prior to administering the nucleic acid construct to the subject. In some such methods, the preexisting AAV immunity is preexisting AAV8 immunity. In some such methods, assessing preexisting AAV immunity comprises assessing immunogenicity using a total antibody immune assay or a neutralizing antibody assay.

[0140] In some such methods, the nucleic acid construct is administered simultaneously with the nuclease agent or the one or more nucleic acids encoding the nuclease agent. In some such methods, the nucleic acid construct is not administered simultaneously with the nuclease agent or the one or more nucleic acids encoding the nuclease agent. In some such methods, the nucleic acid construct is administered prior to the nuclease agent or the one or more nucleic acids encoding the nuclease agent. In some such methods, the nucleic acid construct is administered after the nuclease agent or the one or more nucleic acids encoding the nuclease agent.

### BRIEF DESCRIPTION OF THE FIGURES

[0141] FIG. 1 shows a schematic describing different human factor IX (hFIX) insertion templates tested in adult and neonatal mice.

[0142] FIG. 2A shows hFIX plasma levels in neonatal mice (n = 4-10 per group; male and female) and adult mice (n = 5 per group; female) at different time points post-administration of episomal hFIX (Episome), LNP-g666 + hFIX-HDR-500 template (HDR500), LNP-g666 + hFIX-HDR-800 template (HDR800), and LNP-g666 + hFIX-NHEJ template (NHEJ). The administration in neonatal mice occurred at P0 or P1. Saline-injected mice were used as negative controls. Data are shown on a log scale. FIG. 2B shows hFIX plasma levels in neonatal mice (n = 4-10 per group; male and female) at different time points post-administration of episomal hFIX (Episome), LNP-g666 + hFIX-HDR-500 template (HDR500), LNP-g666 + hFIX-HDR-800 template (HDR800), and LNP-g666 + hFIX-NHEJ template (NHEJ). The administration in neonatal mice occurred at P0 or P1. Saline-injected mice were used as negative controls. Data are shown on a linear scale.

[0143] FIG. 3 shows a schematic of LNP-g9860, which is a lipid nanoparticle containing Cas9 mRNA and sgRNA 9860 targeting human albumin (ALB) intron 1, and a recombinant AAV8 (rAAV8) capsid packaged with an anti-CD63:GAA insertion template.

[0144] FIG. 4 shows a schematic of targeting of GAA to the lysosome via fusion to anti-CD63 scFv.

[0145] FIG. 5 shows a schematic for CRISPR/Cas9-mediated insertion of an anti-CD63:GAA insertion template at the ALB locus. The human ALB locus is depicted, with the Cas9 cut site denoted with scissors. The splice acceptor site flanking the anti-CD63:GAA transgene in the insertion template is depicted. Following insertion and transcription driven by the endogenous ALB promoter, splicing between ALB exon 1 and the inserted anti-CD63:GAA DNA template occurs, diagrammed in dashed lines, to produce a hybrid ALB-anti-CD63:GAA mRNA. The ALB signal peptide promotes secretion of anti-CD63:GAA and is removed during protein maturation to yield anti-CD63:GAA in plasma.

[0146] FIG. 6 shows levels of anti-CD63:GAA in the serum over a 10-month time course following administration of LNP-g666 (1 mg/kg) and a recombinant AAV8 anti-CD63:GAA insertion template (1.2e13 vg/kg) (“Insertion”) or following administration of episomal AAV encoding of anti-CD63:GAA (4e12 vg/kg) (“Episomal”) to adult Pompe disease model male and female mice (n = 12; GAA ^{-/-}; CD63 ^{hu/hu}).

[0147] FIG. 7 shows glycogen levels in the heart, quadricep, diaphragm, and spinal cord in Pompe disease model mice (GAA ^{-/-}; CD63 ^{hu/hu}) at 10 months after administration of LNP-g666 and a recombinant AAV8 anti-CD63:GAA insertion template or at 10 months after administration of episomal AAV encoding anti-CD63:GAA to adult Pompe disease model male and female mice (n = 12; GAA ^{-/-}; CD63 ^{hu/hu).} Wild type GAA mice (GAA ^{+/+}; CD63 ^{hu/hu}; n = 4) and untreated Pompe disease model mice (n = 4) were used as controls. The horizontal dotted line is the lower limit of detection of the assay.

[0148] FIGS. 8A-8B show levels of anti-CD63:GAA in the serum over a 15-month time course following administration of LNP-g666 and a recombinant AAV8 anti-CD63:GAA insertion template (n = 10; male and female; “Insertion”) or following administration of episomal AAV encoding of anti-CD63:GAA (n = 6; male and female; “Episomal”) to neonatal (P1) Pompe disease model mice (GAA ^{-/-}; CD63 ^{hu/hu}). The horizontal dotted line is the lower limit of detection of the assay. The error bars in FIG. 8A are ± SD, and the error bars in FIG. 8B are ± SEM.

[0149] FIG. 9A shows glycogen levels in the heart, quadricep, gastrocnemius, and diaphragm in Pompe disease model mice (GAA ^{-/-}; CD63 ^{hu/hu}) at 3 months after administration of LNP-g666 and a recombinant AAV8 anti-CD63:GAA insertion template (n = 5; male and female, “I”) or at 3 months after administration of episomal AAV encoding anti-CD63:GAA (n = 3; male and female, “E”) to neonatal (P1) mice. Untreated Pompe disease model mice were used as controls.

[0150] FIG. 9B shows glycogen levels in the heart, quadricep, gastrocnemius, diaphragm, cerebrum, and spinal cord in Pompe disease model mice (GAA ^{-/-}; CD63 ^{hu/hu}) at 15 months after administration of LNP-g666 and a recombinant AAV8 anti-CD63:GAA insertion template (n = 10; male and female, “I”) or at 15 months after administration of episomal AAV encoding anti-CD63:GAA (n = 6; male and female, “E”) to neonatal (P1) mice. Untreated Pompe disease model mice (“U”) and wild type mice (“W”) were used as controls.

[0151] FIG. 10 shows grip strength in Pompe disease model mice (GAA ^{-/-}; CD63 ^{hu/hu}) at 15 months after administration of LNP-g666 and a recombinant AAV8 anti-CD63:GAA insertion template (n = 10; male and female, “P1 insertion AAV + LNP”) or at 15 months after administration of episomal AAV encoding anti-CD63:GAA (n = 6; male and female, “P1 episomal AAV”) to neonatal (P1) mice. Wild type GAA mice (GAA ^{+/+}; CD63 ^{hu/hu}; “Wild type”) and untreated Pompe disease model mice (“Untreated KO”) were used as controls.

[0152] FIG. 11 shows IFNα responses as measured by an IFNα ELISA in a primary human plasmacytoid DC-based assay. Various rAAV6 CpG-depleted anti-CD63:GAA templates were tested as compared to the first generation (non-CpG-depleted) anti-CD63:GAA template. rAAV6-GFP was used as a positive control, and a CpG-depleted (0 CpG) F9 template was used as a negative control.

[0153] FIG. 12 shows GAA enzymatic activity in the media after insertion of various anti-CD63:GAA and anti-TfR:GAA insertion templates into the albumin locus of primary human hepatocytes after delivery by rAAV2.

[0154] FIG. 13 shows GAA enzymatic activity in the media after insertion of various anti-CD63:GAA insertion templates into the albumin locus of primary human hepatocytes after delivery by rAAV6.

[0155] FIGS. 14A-14B show GAA serum expression in GAA ^{-/-} mice following administration of LNP-g666 and various recombinant AAV8 anti-CD63:GAA insertion templates. Untreated KO and untreated WT mice were used as controls.

[0156] FIG. 15 shows a schematic of LNP-g9860, which is a lipid nanoparticle containing Cas9 mRNA and sgRNA 9860 targeting human albumin (ALB) intron 1, and a recombinant AAV8 (rAAV8) capsid packaged with an anti-TfR:GAA insertion template.

[0157] FIG. 16 shows a schematic of targeting of GAA through multiple paths via fusion to anti-TfR scFv.

[0158] FIG. 17 shows a schematic for CRISPR/Cas9-mediated insertion of an anti-TfR:GAA insertion template at the ALB locus. The human ALB locus is depicted, with the Cas9 cut site denoted with scissors. The splice acceptor site flanking the anti-TfR:GAA transgene in the insertion template is depicted. Following insertion and transcription driven by the endogenous ALB promoter, splicing between ALB exon 1 and the inserted anti-TfR:GAA DNA template occurs, diagrammed in dashed lines, to produce a hybrid ALB-anti-TfR: GAA mRNA. The ALB signal peptide promotes secretion of anti-TfR:GAA and is removed during protein maturation to yield anti-TfR:GAA in plasma.

[0159] FIGS. 18A-18C show western blots showing that anti-human TfR antibody clones deliver GAA to the cerebrum of Tfrc^{hum} mice. Each lane = 1 mouse. Anti-mouse mTfR:GAA in Wt mice was used as a positive control. Anti-mouse mTfR:GAA in Tfrc^{hum} mice was used as a negative control.

[0160] FIG. 19 shows western blots showing that a subset of anti-hTfR antibody clones deliver mature GAA to the brain parenchyma in scfv:GAA format (delivery by HDD). Anti-mouse mTfR:GAA in Wt mice was used as a positive control. Anti-mouse mTfR:GAA in Tfrc^{hum} mice was used as a negative control.

[0161] FIG. 20 shows western blots showing that four selected anti-hTfR antibody clones deliver mature GAA to the brain parenchyma in scfv:GAA format (AAV8 episomal liver depot gene therapy). Anti-mouse mTfR:GAA in Wt mice was used as a positive control. Anti-mouse mTfR:GAA in Tftc^{hum} mice was used as a negative control.

[0162] FIG. 21 shows western blots showing that three selected episomal AAV8 liver depot anti-hTfR antibody clones deliver mature GAA to the CNS, heart, and muscle in Gaa^{-/-} /Tfrc^{hum} mice.

[0163] FIGS. 22A and 22B show that four selected episomal AAV8 liver depot anti-hTfR antibody clones rescue glycogen storage in CNS, heart, and muscle in Gaa^{-/-}/Tfrc^{hum} mice. Wt untreated mice were a positive control, and Gaa^{-/-} untreated mice were a negative control.

[0164] FIG. 22C shows that a selected episomal AAV8 liver depot anti-hTfR antibody clone rescues glycogen storage in dorsal root ganglia (DRGs) in Gaa^{-/-}/Tfrc^{hum} mice. Wt untreated mice were a positive control, and Gaa^{-/-} untreated mice were a negative control.

[0165] FIGS. 23A-23D show that three selected episomal AAV8 liver depot anti-hTfR antibody clones rescue glycogen storage in brain thalamus (FIG. 23A), brain cerebral cortex (FIG. 23B), brain hippocampus CA1 (FIG. 23C), and quadricep (FIG. 23D) in Gaa^{-/-} /Tfrc^{hum} mice. Wt untreated mice were a positive control, and Gaa^{-/-} untreated mice were a negative control.

[0166] FIG. 24A shows that insertion of anti-hTfR 12847scfv:GAA delivers mature GAA protein to CNS and muscle of Pompe model mice. FIG. 24B shows that insertion of anti-hTfR 12847scfv:GAA rescues glycogen storage in CNS and muscle of Pompe model mice. One Way ANOVA ^{∗}p<0.01; ^{∗∗}p<0.001; ^{∗∗∗}p<0.0001. Untreated Pompe disease model mice and wild type mice were used as controls. Mice injected with a recombinant AAV8 anti-TfR:GAA episomal template were used as a positive control. Mice injected with a recombinant AAV8 anti-TfR:GAA insertion template without LNP-g666 were used as a negative control.

[0167] FIGS. 25A and 25B show GAA enzymatic activity in the media after insertion of various anti-TfR:GAA insertion templates (CpG depleted and native) into the albumin locus of primary human hepatocytes after delivery by rAAV2.

[0168] FIG. 26A shows western blots showing that anti-human TfR antibody clones (0 CpG and native) deliver GAA to the brain (cerebrum) of 3-month-old Gaa^{-/-}/Tfrc^{hum} mice dosed intravenously with LNP-g666 (3 mg/kg) and various recombinant AAV8 anti-TfR:GAA or AAV8 anti-CD63:GAA insertion templates. Each lane = 1 mouse.

[0169] FIG. 26B shows that albumin insertion of anti-hTfR:GAA rescues glycogen storage in cerebrum, quadriceps, diaphragm, and heart in Gaa^{-/-}/Tfrc^{hum} mice dosed intravenously with LNP-g666 (3 mg/kg) and various recombinant AAV8 anti-TfR:GAA or AAV8 anti-CD63:GAA insertion templates. Glycogen levels were measured at 3 weeks post-administration. Wt untreated mice were a positive control, and Gaa^{-/-} untreated mice were a negative control.

[0170] FIG. 27A shows GAA activity in serum measured using a fluorometric substrate assay in cynomolgus macaques that were administered recombinant AAV8 containing a CpG depleted anti-CD63:GAA template and LNP-g9860. Three different AAV8 doses were used (0.3e13vg/kg, 1.5e13vg/kg, and 5.6e13vg/kg) with a 3 mg/kg LNP dose. N=1 in the vehicle control group, and N=3 in the dosed groups.

[0171] FIG. 27B shows expression of mature GAA in tissue lysates from cynomolgus macaques that were administered recombinant AAV8 containing a CpG depleted anti-CD63:GAA template and LNP-g9860. Three different AAV8 doses were used (0.3e13vg/kg, 1.5e13vg/kg, and 5.6e13vg/kg) with a 3 mg/kg LNP dose. N=1 in the vehicle control group, and N=3 in the dosed groups. Tissues were collected at sacrifice (Day 89) and probed by western blot for presence of a 76 kDa lysosomal form of GAA.

### DEFINITIONS

[0172] The terms “protein,” “polypeptide,” and “peptide,” used interchangeably herein, include polymeric forms of amino acids of any length, including coded and non-coded amino acids and chemically or biochemically modified or derivatized amino acids. The terms also include polymers that have been modified, such as polypeptides having modified peptide backbones. The term “domain” refers to any part of a protein or polypeptide having a particular function or structure.

[0173] Proteins are said to have an “N-terminus” and a “C-terminus.” The term “N-terminus” relates to the start of a protein or polypeptide, terminated by an amino acid with a free amine group (—NH2). The term “C-terminus” relates to the end of an amino acid chain (protein or polypeptide), terminated by a free carboxyl group (—COOH).

[0174] The terms “nucleic acid” and “polynucleotide,” used interchangeably herein, include polymeric forms of nucleotides of any length, including ribonucleotides, deoxyribonucleotides, or analogs or modified versions thereof. They include single-, double-, and multi-stranded DNA or RNA, genomic DNA, cDNA, DNA-RNA hybrids, and polymers comprising purine bases, pyrimidine bases, or other natural, chemically modified, biochemically modified, non-natural, or derivatized nucleotide bases.

[0175] Nucleic acids are said to have “5′ ends” and “3′ ends” because mononucleotides are reacted to make oligonucleotides in a manner such that the 5′ phosphate of one mononucleotide pentose ring is attached to the 3′ oxygen of its neighbor in one direction via a phosphodiester linkage. An end of an oligonucleotide is referred to as the “5′ end” if its 5′ phosphate is not linked to the 3′ oxygen of a mononucleotide pentose ring. An end of an oligonucleotide is referred to as the “3′ end” if its 3′ oxygen is not linked to a 5′ phosphate of another mononucleotide pentose ring. A nucleic acid sequence, even if internal to a larger oligonucleotide, also may be said to have 5′ and 3′ ends. In either a linear or circular DNA molecule, discrete elements are referred to as being “upstream” or 5′ of the “downstream” or 3′ elements.

[0176] The term “genomically integrated” refers to a nucleic acid that has been introduced into a cell such that the nucleotide sequence integrates into the genome of the cell. Any protocol may be used for the stable incorporation of a nucleic acid into the genome of a cell.

[0177] The term “viral vector” refers to a recombinant nucleic acid that includes at least one element of viral origin and includes elements sufficient for or permissive of packaging into a viral vector particle. The vector and/or particle can be utilized for the purpose of transferring DNA, RNA, or other nucleic acids into cells in vitro, ex vivo, or in vivo. Numerous forms of viral vectors are known.

[0178] The term “isolated” with respect to cells, tissues (e.g., liver samples), proteins, and nucleic acids includes cells, tissues (e.g., liver samples), proteins, and nucleic acids that are relatively purified with respect to other bacterial, viral, cellular, or other components that may normally be present in situ, up to and including a substantially pure preparation of the cells, tissues (e.g., liver samples), proteins, and nucleic acids. The term “isolated” also includes cells, tissues (e.g., liver samples), proteins, and nucleic acids that have no naturally occurring counterpart, have been chemically synthesized and are thus substantially uncontaminated by other cells, tissues (e.g., liver samples), proteins, and nucleic acids, or has been separated or purified from most other components (e.g., cellular components) with which they are naturally accompanied (e.g., other cellular proteins, polynucleotides, or cellular components).

[0179] The term “wild type” includes entities having a structure and/or activity as found in a normal (as contrasted with mutant, diseased, altered, or so forth) state or context. Wild type genes and polypeptides often exist in multiple different forms (e.g., alleles).

[0180] The term “endogenous sequence” refers to a nucleic acid sequence that occurs naturally within a cell or animal. For example, an endogenous ALB sequence of a human refers to a native ALB sequence that naturally occurs at the ALB locus in the human.

[0181] “Exogenous” molecules or sequences include molecules or sequences that are not normally present in a cell in that form. Normal presence includes presence with respect to the particular developmental stage and environmental conditions of the cell. An exogenous molecule or sequence, for example, can include a mutated version of a corresponding endogenous sequence within the cell, such as a humanized version of the endogenous sequence, or can include a sequence corresponding to an endogenous sequence within the cell but in a different form (i.e., not within a chromosome). In contrast, endogenous molecules or sequences include molecules or sequences that are normally present in that form in a particular cell at a particular developmental stage under particular environmental conditions.

[0182] The term “heterologous” when used in the context of a nucleic acid or a protein indicates that the nucleic acid or protein comprises at least two segments that do not naturally occur together in the same molecule. For example, the term “heterologous,” when used with reference to segments of a nucleic acid or segments of a protein, indicates that the nucleic acid or protein comprises two or more sub-sequences that are not found in the same relationship to each other (e.g., joined together) in nature. As one example, a “heterologous” region of a nucleic acid vector is a segment of nucleic acid within or attached to another nucleic acid molecule that is not found in association with the other molecule in nature. For example, a heterologous region of a nucleic acid vector could include a coding sequence flanked by sequences not found in association with the coding sequence in nature. Likewise, a “heterologous” region of a protein is a segment of amino acids within or attached to another peptide molecule that is not found in association with the other peptide molecule in nature (e.g., a fusion protein, or a protein with a tag). Similarly, a nucleic acid or protein can comprise a heterologous label or a heterologous secretion or localization sequence.

[0183] “Codon optimization” (i.e., “codon optimized” sequences) takes advantage of the degeneracy of codons, as exhibited by the multiplicity of three-base pair codon combinations that specify an amino acid, and generally includes a process of modifying a nucleic acid sequence for enhanced expression in particular host cells by replacing at least one codon of the native sequence with a codon that is more frequently or most frequently used in the genes of the host cell while maintaining the native amino acid sequence. For example, a nucleic acid encoding a polypeptide of interest can be modified to substitute codons having a higher frequency of usage in a given prokaryotic or eukaryotic cell, including a bacterial cell, a yeast cell, a human cell, a non-human cell, a mammalian cell, a rodent cell, a mouse cell, a rat cell, a hamster cell, or any other host cell, as compared to the naturally occurring nucleic acid sequence. Codon usage tables are readily available, for example, at the “Codon Usage Database.” These tables can be adapted in a number of ways. See Nakamura et al. (2000) Nucleic Acids Res. 28(1):292, herein incorporated by reference in its entirety for all purposes. Computer algorithms for codon optimization of a particular sequence for expression in a particular host are also available (see, e.g., Gene Forge).

[0184] The term “locus” refers to a specific location of a gene (or significant sequence), DNA sequence, polypeptide-encoding sequence, or position on a chromosome of the genome of an organism. For example, an “ALB locus” may refer to the specific location of an ALB gene, ALB DNA sequence, albumin-encoding sequence, or ALB position on a chromosome of the genome of an organism that has been identified as to where such a sequence resides. An “ALB locus” may comprise a regulatory element of an ALB gene, including, for example, an enhancer, a promoter, 5′ and/or 3′ untranslated region (UTR), or a combination thereof.

[0185] The term “gene” refers to DNA sequences in a chromosome that may contain, if naturally present, at least one coding and at least one non-coding region. The DNA sequence in a chromosome that codes for a product (e.g., but not limited to, an RNA product and/or a polypeptide product) can include the coding region interrupted with non-coding introns and sequence located adjacent to the coding region on both the 5′ and 3′ ends such that the gene corresponds to the full-length mRNA (including the 5′ and 3′ untranslated sequences). Additionally, other non-coding sequences including regulatory sequences (e.g., but not limited to, promoters, enhancers, and transcription factor binding sites), polyadenylation signals, internal ribosome entry sites, silencers, insulating sequence, and matrix attachment regions may be present in a gene. These sequences may be close to the coding region of the gene (e.g., but not limited to, within 10 kb) or at distant sites, and they influence the level or rate of transcription and translation of the gene.

[0186] The term “allele” refers to a variant form of a gene. Some genes have a variety of different forms, which are located at the same position, or genetic locus, on a chromosome. A diploid organism has two alleles at each genetic locus. Each pair of alleles represents the genotype of a specific genetic locus. Genotypes are described as homozygous if there are two identical alleles at a particular locus and as heterozygous if the two alleles differ.

[0187] A “promoter” is a regulatory region of DNA usually comprising a TATA box capable of directing RNA polymerase II to initiate RNA synthesis at the appropriate transcription initiation site for a particular polynucleotide sequence. A promoter may additionally comprise other regions which influence the transcription initiation rate. The promoter sequences disclosed herein modulate transcription of an operably linked polynucleotide. A promoter can be active in one or more of the cell types disclosed herein (e.g., a mouse cell, a rat cell, a pluripotent cell, a one-cell stage embryo, a differentiated cell, or a combination thereof). A promoter can be, for example, a constitutively active promoter, a conditional promoter, an inducible promoter, a temporally restricted promoter (e.g., a developmentally regulated promoter), or a spatially restricted promoter (e.g., a cell-specific or tissue-specific promoter). Examples of promoters can be found, for example, in WO 2013/176772, herein incorporated by reference in its entirety for all purposes.

[0188] “Operable linkage” or being “operably linked” includes juxtaposition of two or more components (e.g., a promoter and another sequence element) such that both components function normally and allow the possibility that at least one of the components can mediate a function that is exerted upon at least one of the other components. For example, a promoter can be operably linked to a coding sequence if the promoter controls the level of transcription of the coding sequence in response to the presence or absence of one or more transcriptional regulatory factors. Operable linkage can include such sequences being contiguous with each other or acting in trans (e.g., a regulatory sequence can act at a distance to control transcription of the coding sequence).

[0189] The methods and compositions provided herein employ a variety of different components. Some components throughout the description can have active variants and fragments. The term “functional” refers to the innate ability of a protein or nucleic acid (or a fragment or variant thereof) to exhibit a biological activity or function. The biological functions of functional fragments or variants may be the same or may in fact be changed (e.g., with respect to their specificity or selectivity or efficacy) in comparison to the original molecule, but with retention of the molecule’s basic biological function.

[0190] The term “variant” refers to a nucleotide sequence differing from the sequence most prevalent in a population (e.g., by one nucleotide) or a protein sequence different from the sequence most prevalent in a population (e.g., by one amino acid).

[0191] The term “fragment,” when referring to a protein, means a protein that is shorter or has fewer amino acids than the full-length protein. The term “fragment,” when referring to a nucleic acid, means a nucleic acid that is shorter or has fewer nucleotides than the full-length nucleic acid. A fragment can be, for example, when referring to a protein fragment, an N-terminal fragment (i.e., removal of a portion of the C-terminal end of the protein), a C-terminal fragment (i.e., removal of a portion of the N-terminal end of the protein), or an internal fragment (i.e., removal of a portion of each of the N-terminal and C-terminal ends of the protein). A fragment can be, for example, when referring to a nucleic acid fragment, a 5′ fragment (i.e., removal of a portion of the 3′ end of the nucleic acid), a 3′ fragment (i.e., removal of a portion of the 5′ end of the nucleic acid), or an internal fragment (i.e., removal of a portion each of the 5′ and 3′ ends of the nucleic acid).

[0192] “Sequence identity” or “identity” in the context of two polynucleotides or polypeptide sequences refers to the residues in the two sequences that are the same when aligned for maximum correspondence over a specified comparison window. When percentage of sequence identity is used in reference to proteins, residue positions which are not identical often differ by conservative amino acid substitutions, where amino acid residues are substituted for other amino acid residues with similar chemical properties (e.g., charge or hydrophobicity) and therefore do not change the functional properties of the molecule. When sequences differ in conservative substitutions, the percent sequence identity may be adjusted upwards to correct for the conservative nature of the substitution. Sequences that differ by such conservative substitutions are said to have “sequence similarity” or “similarity.” Means for making this adjustment are well known. Typically, this involves scoring a conservative substitution as a partial rather than a full mismatch, thereby increasing the percentage sequence identity. Thus, for example, where an identical amino acid is given a score of 1 and a non-conservative substitution is given a score of zero, a conservative substitution is given a score between zero and 1. The scoring of conservative substitutions is calculated, e.g., as implemented in the program PC/GENE (Intelligenetics, Mountain View, California).

[0193] “Percentage of sequence identity” includes the value determined by comparing two optimally aligned sequences (greatest number of perfectly matched residues) over a comparison window, wherein the portion of the polynucleotide sequence in the comparison window may comprise additions or deletions (i.e., gaps) as compared to the reference sequence (which does not comprise additions or deletions) for optimal alignment of the two sequences. The percentage is calculated by determining the number of positions at which the identical nucleic acid base or amino acid residue occurs in both sequences to yield the number of matched positions, dividing the number of matched positions by the total number of positions in the window of comparison, and multiplying the result by 100 to yield the percentage of sequence identity. Unless otherwise specified (e.g., the shorter sequence includes a linked heterologous sequence), the comparison window is the full length of the shorter of the two sequences being compared.

[0194] Unless otherwise stated, sequence identity/similarity values include the value obtained using GAP Version 10 using the following parameters: % identity and % similarity for a nucleotide sequence using GAP Weight of 50 and Length Weight of 3, and the nwsgapdna.cmp scoring matrix; % identity and % similarity for an amino acid sequence using GAP Weight of 8 and Length Weight of 2, and the BLOSUM62 scoring matrix; or any equivalent program thereof. “Equivalent program” includes any sequence comparison program that, for any two sequences in question, generates an alignment having identical nucleotide or amino acid residue matches and an identical percent sequence identity when compared to the corresponding alignment generated by GAP Version 10.

[0195] The term “conservative amino acid substitution” refers to the substitution of an amino acid that is normally present in the sequence with a different amino acid of similar size, charge, or polarity. Examples of conservative substitutions include the substitution of a non-polar (hydrophobic) residue such as isoleucine, valine, or leucine for another non-polar residue. Likewise, examples of conservative substitutions include the substitution of one polar (hydrophilic) residue for another such as between arginine and lysine, between glutamine and asparagine, or between glycine and serine. Additionally, the substitution of a basic residue such as lysine, arginine, or histidine for another, or the substitution of one acidic residue such as aspartic acid or glutamic acid for another acidic residue are additional examples of conservative substitutions. Examples of non-conservative substitutions include the substitution of a non-polar (hydrophobic) amino acid residue such as isoleucine, valine, leucine, alanine, or methionine for a polar (hydrophilic) residue such as cysteine, glutamine, glutamic acid or lysine and/or a polar residue for a non-polar residue. Typical amino acid categorizations are summarized below.

TABLE 1

Amino Acid Categorizations

| | | | | | |
|---|---|---|---|---|---|
| Alanine | Ala | A | Nonpolar | Neutral | 1.8 |
| Arginine | Arg | R | Polar | Positive | -4.5 |
| Asparagine | Asn | N | Polar | Neutral | -3.5 |
| Aspartic acid | Asp | D | Polar | Negative | -3.5 |
| Cysteine | Cys | C | Nonpolar | Neutral | 2.5 |
| Glutamic acid | Glu | E | Polar | Negative | -3.5 |
| Glutamine | Gln | Q | Polar | Neutral | -3.5 |
| Glycine | Gly | G | Nonpolar | Neutral | -0.4 |
| Histidine | His | H | Polar | Positive | -3.2 |
| Isoleucine | Ile | I | Nonpolar | Neutral | 4.5 |
| Leucine | Leu | L | Nonpolar | Neutral | 3.8 |
| Lysine | Lys | K | Polar | Positive | -3.9 |
| Methionine | Met | M | Nonpolar | Neutral | 1.9 |
| Phenylalanine | Phe | F | Nonpolar | Neutral | 2.8 |
| Proline | Pro | P | Nonpolar | Neutral | -1.6 |
| Serine | Ser | S | Polar | Neutral | -0.8 |
| Threonine | Thr | T | Polar | Neutral | -0.7 |
| Tryptophan | Trp | W | Nonpolar | Neutral | -0.9 |
| Tyrosine | Tyr | Y | Polar | Neutral | -1.3 |
| Valine | Val | V | Nonpolar | Neutral | 4.2 |

[0196] A “homologous” sequence (e.g., nucleic acid sequence) includes a sequence that is either identical or substantially similar to a known reference sequence, such that it is, for example, at least 50%, at least 55%, at least 60%, at least 65%, at least 70%, at least 75%, at least 80%, at least 85%, at least 90%, at least 95%, at least 96%, at least 97%, at least 98%, at least 99%, or 100% identical to the known reference sequence. Homologous sequences can include, for example, orthologous sequence and paralogous sequences. Homologous genes, for example, typically descend from a common ancestral DNA sequence, either through a speciation event (orthologous genes) or a genetic duplication event (paralogous genes). “Orthologous” genes include genes in different species that evolved from a common ancestral gene by speciation. Orthologs typically retain the same function in the course of evolution. “Paralogous” genes include genes related by duplication within a genome. Paralogs can evolve new functions in the course of evolution.

[0197] The term “in vitro” includes artificial environments and to processes or reactions that occur within an artificial environment (e.g., a test tube or an isolated cell or cell line). The term “in vivo” includes natural environments (e.g., a cell or organism or body) and to processes or reactions that occur within a natural environment. The term “ex vivo” includes cells that have been removed from the body of an individual and processes or reactions that occur within such cells.

[0198] The term “antibody,” as used herein, includes immunoglobulin molecules comprising four polypeptide chains, two heavy (H) chains and two light (L) chains inter-connected by disulfide bonds. Each heavy chain comprises a heavy chain variable region (abbreviated herein as HCVR or VH) and a heavy chain constant region. The heavy chain constant region comprises three domains, CH1, CH2 and CH3. Each light chain comprises a light chain variable region (abbreviated herein as LCVR or VL) and a light chain constant region. The light chain constant region comprises one domain, CL. The VH and VL regions can be further subdivided into regions of hypervariability, termed complementarity determining regions (CDR), interspersed with regions that are more conserved, termed framework regions (FR). Each VH and VL is composed of three CDRs and four FRs, arranged from amino-terminus to carboxy-terminus in the following order: FR1, CDR1, FR2, CDR2, FR3, CDR3, FR4 (heavy chain CDRs may be abbreviated as HCDR1, HCDR2 and HCDR3; light chain CDRs may be abbreviated as LCDR1, LCDR2 and LCDR3. The term “high affinity” antibody refers to those antibodies having a binding affinity to their target of at least 10⁻⁹ M, at least 10⁻¹⁰ M; at least 10⁻¹¹ M; or at least 10⁻¹² M, as measured by surface plasmon resonance, e.g., BIACORE™ or solution-affinity ELISA. The term “antibody” may encompass any type of antibody, such as e.g. monoclonal or polyclonal. Moreover, the antibody may be or any origin, such as e.g. mammalian or non-mammalian. In one embodiment, the antibody may be mammalian or avian. In a further embodiment, the antibody may be or human origin and may further be a human monoclonal antibody.

[0199] The phrase “bispecific antibody” includes an antibody capable of selectively binding two or more epitopes. Bispecific antibodies generally comprise two different heavy chains, with each heavy chain specifically binding a different epitope-either on two different molecules (e.g., antigens) or on the same molecule (e.g., on the same antigen). If a bispecific antibody is capable of selectively binding two different epitopes (a first epitope and a second epitope), the affinity of the first heavy chain for the first epitope will generally be at least one to two or three or four orders of magnitude lower than the affinity of the first heavy chain for the second epitope, and vice versa. The epitopes recognized by the bispecific antibody can be on the same or a different target (e.g., on the same or a different protein). Bispecific antibodies can be made, for example, by combining heavy chains that recognize different epitopes of the same antigen. For example, nucleic acid sequences encoding heavy chain variable sequences that recognize different epitopes of the same antigen can be fused to nucleic acid sequences encoding different heavy chain constant regions, and such sequences can be expressed in a cell that expresses an immunoglobulin light chain. A typical bispecific antibody has two heavy chains each having three heavy chain CDRs, followed by (N-terminal to C-terminal) a CH1 domain, a hinge, a CH2 domain, and a CH3 domain, and an immunoglobulin light chain that either does not confer antigen-binding specificity but that can associate with each heavy chain, or that can associate with each heavy chain and that can bind one or more of the epitopes bound by the heavy chain antigen-binding regions, or that can associate with each heavy chain and enable binding or one or both of the heavy chains to one or both epitopes.

[0200] The phrase “heavy chain,” or “immunoglobulin heavy chain” includes an immunoglobulin heavy chain constant region sequence from any organism, and unless otherwise specified includes a heavy chain variable domain. Heavy chain variable domains include three heavy chain CDRs and four FR regions, unless otherwise specified. Fragments of heavy chains include CDRs, CDRs and FRs, and combinations thereof. A typical heavy chain has, following the variable domain (from N-terminal to C-terminal), a CH1 domain, a hinge, a CH2 domain, and a CH3 domain. A functional fragment of a heavy chain includes a fragment that is capable of specifically recognizing an antigen (e.g., recognizing the antigen with a KD in the micromolar, nanomolar, or picomolar range), that is capable of expressing and secreting from a cell, and that comprises at least one CDR.

[0201] The phrase “light chain” includes an immunoglobulin light chain constant region sequence from any organism, and unless otherwise specified includes human kappa and lambda light chains. Light chain variable (VL) domains typically include three light chain CDRs and four framework (FR) regions, unless otherwise specified. Generally, a full-length light chain includes, from amino terminus to carboxyl terminus, a VL domain that includes FR1-CDR1-FR2-CDR2-FR3-CDR3-FR4, and a light chain constant domain. Light chains that can be used with this invention include, for example, those that do not selectively bind either the first or second antigen selectively bound by the antigen-binding protein. Suitable light chains include those that can be identified by screening for the most commonly employed light chains in existing antibody libraries (wet libraries or in silico), where the light chains do not substantially interfere with the affinity and/or selectivity of the antigen-binding domains of the antigen-binding proteins. Suitable light chains include those that can bind one or both epitopes that are bound by the antigen-binding regions of the antigen-binding protein.

[0202] The phrase “variable domain” includes an amino acid sequence of an immunoglobulin light or heavy chain (modified as desired) that comprises the following amino acid regions, in sequence from N-terminal to C-terminal (unless otherwise indicated): FR1, CDR1, FR2, CDR2, FR3, CDR3, FR4. A “variable domain” includes an amino acid sequence capable of folding into a canonical domain (VH or VL) having a dual beta sheet structure wherein the beta sheets are connected by a disulfide bond between a residue of a first beta sheet and a second beta sheet.

[0203] The phrase “complementarity determining region,” or the term “CDR,” includes an amino acid sequence encoded by a nucleic acid sequence of an organism’s immunoglobulin genes that normally (i.e., in a wild type animal) appears between two framework regions in a variable region of a light or a heavy chain of an immunoglobulin molecule (e.g., an antibody or a T cell receptor). A CDR can be encoded by, for example, a germline sequence or a rearranged or unrearranged sequence, and, for example, by a naive or a mature B cell or a T cell. In some circumstances (e.g., for a CDR3), CDRs can be encoded by two or more sequences (e.g., germline sequences) that are not contiguous (e.g., in an unrearranged nucleic acid sequence) but are contiguous in a B cell nucleic acid sequence, for example, as the result of splicing or connecting the sequences (e.g., V-D-J recombination to form a heavy chain CDR3).

[0204] The term “antibody fragment” refers to one or more fragments of an antibody that retain the ability to specifically bind to an antigen. Examples of binding fragments encompassed within the term “antibody fragment” include (i) a Fab fragment, a monovalent fragment consisting of the VL, VH, CL and CH1 domains; (ii) a F(ab′)2 fragment, a bivalent fragment comprising two Fab fragments linked by a disulfide bridge at the hinge region; (iii) a Fd fragment consisting of the VH and CH1 domains; (iv) a Fv fragment consisting of the VL and VH domains of a single arm of an antibody, (v) a dAb fragment (Ward et al. (1989) Nature 241:544-546), which consists of a VH domain, (vi) an isolated CDR, and (vii) an scFv, which consists of the two domains of the Fv fragment, VL and VH, joined by a synthetic linker to form a single protein chain in which the VL and VH regions pair to form monovalent molecules. Other forms of single chain antibodies, such as diabodies are also encompassed under the term “antibody” (see e.g., Holliger et al. (1993) Proc. Natl. Acad. Sci. U.S.A. 90:6444-6448; Poljak et al. (1994) Structure 2:1121-1123).

[0205] The phrase “Fc-containing protein” includes antibodies, bispecific antibodies, immunoadhesins, and other binding proteins that comprise at least a functional portion of an immunoglobulin CH2 and CH3 region. A “functional portion” refers to a CH2 and CH3 region that can bind a Fc receptor (e.g., an FcyR; or an FcRn, i.e., a neonatal Fc receptor), and/or that can participate in the activation of complement. If the CH2 and CH3 region contains deletions, substitutions, and/or insertions or other modifications that render it unable to bind any Fc receptor and also unable to activate complement, the CH2 and CH3 region is not functional.

[0206] Fc-containing proteins can comprise modifications in immunoglobulin domains, including where the modifications affect one or more effector function of the binding protein (e.g., modifications that affect FcyR binding, FcRn binding and thus half-life, and/or CDC activity). Such modifications include, but are not limited to, the following modifications and combinations thereof, with reference to EU numbering of an immunoglobulin constant region: 238, 239, 248, 249, 250, 252, 254, 255, 256, 258, 265, 267, 268, 269, 270, 272, 276, 278, 280, 283, 285, 286, 289, 290, 292, 293, 294, 295, 296, 297, 298, 301, 303, 305, 307, 308, 309, 311, 312, 315, 318, 320, 322, 324, 326, 327, 328, 329, 330, 331, 332, 333, 334, 335, 337, 338, 339, 340, 342, 344, 356, 358, 359, 360, 361, 362, 373, 375, 376, 378, 380, 382, 383, 384, 386, 388, 389, 398, 414, 416, 419, 428, 430, 433, 434, 435, 437, 438, and 439.

[0207] For example, and not by way of limitation, the binding protein is an Fc-containing protein and exhibits enhanced serum half-life (as compared with the same Fc-containing protein without the recited modification(s)) and have a modification at position 250 (e.g., E or Q); 250 and 428 (e.g., L or F); 252 (e.g., L/Y/F/W or T), 254 (e.g., S or T), and 256 (e.g., S/R/Q/E/D or T); or a modification at 428 and/or 433 (e.g., L/R/SI/P/Q or K) and/or 434 (e.g., H/F or Y); or a modification at 250 and/or 428; or a modification at 307 or 308 (e.g., 308F, V308F), and 434. In another example, the modification can comprise a 428L (e.g., M428L) and 434S (e.g., N434S) modification; a 428L, 2591 (e.g., V259I), and a 308F (e.g., V308F) modification; a 433 K (e.g., H433K) and a 434 (e.g., 434Y) modification; a 252, 254, and 256 (e.g., 252Y, 254T, and 256E) modification; a 250Q and 428L modification (e.g., T250Q and M428L); a 307 and/or 308 modification (e.g., 308F or 308P).

[0208] The term “antigen-binding protein,” as used herein, refers to a polypeptide or protein (one or more polypeptides complexed in a functional unit) that specifically recognizes an epitope on an antigen, such as a cell-specific antigen and/or a target antigen of the present invention. An antigen-binding protein may be multi-specific. The term “multi-specific” with reference to an antigen-binding protein means that the protein recognizes different epitopes, either on the same antigen or on different antigens. A multi-specific antigen-binding protein of the present invention can be a single multifunctional polypeptide, or it can be a multimeric complex of two or more polypeptides that are covalently or non-covalently associated with one another. The term “antigen-binding protein” includes antibodies or fragments thereof of the present invention that may be linked to or co-expressed with another functional molecule, for example, another peptide or protein. For example, an antibody or fragment thereof can be functionally linked (e.g., by chemical coupling, genetic fusion, non-covalent association or otherwise) to one or more other molecular entities, such as a protein or fragment thereof to produce a bispecific or a multi-specific antigen-binding molecule with a second binding specificity.

[0209] As used herein, the term “epitope” refers to the portion of the antigen which is recognized by the multi-specific antigen-binding polypeptide. A single antigen (such as an antigenic polypeptide) may have more than one epitope. Epitopes may be defined as structural or functional. Functional epitopes are generally a subset of structural epitopes and are defined as those residues that directly contribute to the affinity of the interaction between the antigen-binding polypeptide and the antigen. Epitopes may also be conformational, that is, composed of non-linear amino acids. In certain embodiments, epitopes may include determinants that are chemically active surface groupings of molecules such as amino acids, sugar side chains, phosphoryl groups, or sulfonyl groups, and, in certain embodiments, may have specific three-dimensional structural characteristics, and/or specific charge characteristics. Epitopes formed from contiguous amino acids are typically retained on exposure to denaturing solvents, whereas epitopes formed by tertiary folding are typically lost on treatment with denaturing solvents.

[0210] The term “domain” refers to any part of a protein or polypeptide having a particular function or structure. Preferably, domains of the present invention bind to cell-specific or target antigens. Cell-specific antigen- or target antigen-binding domains, and the like, as used herein, include any naturally occurring, enzymatically obtainable, synthetic, or genetically engineered polypeptide or glycoprotein that specifically binds an antigen.

[0211] The term “half-body” or “half-antibody”, which are used interchangeably, refers to half of an antibody, which essentially contains one heavy chain and one light chain. Antibody heavy chains can form dimers, thus the heavy chain of one half-body can associate with heavy chain associated with a different molecule (e.g., another half-body) or another Fc-containing polypeptide. Two slightly different Fc-domains may “heterodimerize” as in the formation of bispecific antibodies or other heterodimers, -trimers, -tetramers, and the like. See Vincent and Murini (2012) Biotechnol. J. 7(12):1444-1450; and Shimamoto et al. (2012) MAbs 4(5):586-91. In one embodiment, the half-body variable domain specifically recognizes the internalization effector and the half body Fc-domain dimerizes with an Fc-fusion protein that comprises a replacement enzyme (e.g., a peptibody).

[0212] The term “single-chain variable fragment” or “scFv” includes a single chain fusion polypeptide containing an immunoglobulin heavy chain variable region (VH) and an immunoglobulin light chain variable region (VL). In some embodiments, the VH and VL are connect by a linker sequence of 10 to 25 amino acids. ScFv polypeptides may also include other amino acid sequences, such as CL or CH1 regions. ScFv molecules can be manufactured by phage display or made by directly subcloning the heavy and light chains from a hybridoma or B-cell. See Ahmad et al. (2012) Clin. Dev. Immunol. 2012:980250, herein incorporated by reference in its entirety for all purposes.

[0213] As used herein, the term “neonatal” in the context of humans covers human subjects up to or under the age of 1 year (52 weeks), preferably up to or under the age of 24 weeks, more preferably up to or under the age of 12 weeks, more preferably up to or under the age of 8 weeks, and even more preferably up to or under the age of 4 weeks. In certain embodiments, a neonatal human subject is up to 4 weeks of age. In certain embodiments, a neonatal human subject is up to 8 weeks of age. In another embodiment, a neonatal human subject is within 3 weeks after birth. In another embodiment, a neonatal human subject is within 2 weeks after birth. In another embodiment, a neonatal human subject is within 1 week after birth. In another embodiment, a neonatal human subject is within 7 days after birth. In another embodiment, a neonatal human subject is within 6 days after birth. In another embodiment, a neonatal human subject is within 5 days after birth. In another embodiment, a neonatal human subject is within 4 days after birth. In another embodiment, a neonatal human subject is within 3 days after birth. In another embodiment, a neonatal human subject is within 2 days after birth. In another embodiment, a neonatal human subject is within 1 day after birth. The time windows disclosed above are for human subjects and are also meant to cover the corresponding developmental time windows for other animals. As used herein, a “neonatal cell” is a cell of a neonatal subject, and a population of neonatal cells is a population of cells of a neonatal subject.

[0214] As used herein, a “control” as in a control sample or a control subject is a comparator for a measurement, e.g., a diagnostic measurement of a sign or symptom of a disease. In certain embodiments, a control can be a subject sample from the same subject an earlier time point, e.g., before a treatment intervention. In certain embodiments, a control can be a measurement from a normal subject, i.e., a subject not having the disease of the treated subject, to provide a normal control, e.g., an enzyme concentration or activity in a subject sample. In certain embodiments, a normal control can be a population control, i.e., the average of subjects in the general population. In certain embodiments, a control can be an untreated subject with the same disease. In certain embodiments, a control can be a subject treated with a different therapy, e.g., the standard of care. In certain embodiments, a control can be a subject or a population of subjects from a natural history study of subjects with the disease of the subject being compared. In certain embodiments, the control is matched for certain factors to the subject being tested, e.g., age, gender. In certain embodiments, a control may be a control level for a particular lab, e.g., a clinical lab. Selection of an appropriate control is within the ability of those of skill in the art.

[0215] Compositions or methods “comprising” or “including” one or more recited elements may include other elements not specifically recited. For example, a composition that “comprises” or “includes” a protein may contain the protein alone or in combination with other ingredients. The transitional phrase “consisting essentially of′ means that the scope of a claim is to be interpreted to encompass the specified elements recited in the claim and those that do not materially affect the basic and novel characteristic(s) of the claimed invention. Thus, the term “consisting essentially of′ when used in a claim of this invention is not intended to be interpreted to be equivalent to “comprising.”

[0216] “Optional” or “optionally” means that the subsequently described event or circumstance may or may not occur and that the description includes instances in which the event or circumstance occurs and instances in which the event or circumstance does not.

[0217] Designation of a range of values includes all integers within or defining the range, and all subranges defined by integers within the range. For example, 5-10 nucleotides is understood as 5, 6, 7, 8, 9, or 10 nucleotides, whereas 5-10% is understood to contain 5% and all possible values through 10%.

[0218] At least 17 nucleotides of a 20 nucleotide sequence is understood to include 17, 18, 19, or 20 nucleotides of the sequence provided, thereby providing a upper limit even if one is not specifically provided as it would be clearly understood. Similarly, up to 3 nucleotides would be understood to encompass 0, 1, 2, or 3 nucleotides, providing a lower limit even if one is not specifically provided. When “at least”, “up to”, or other similar language modifies a number, it can be understood to modify each number in the series.

[0219] As used herein, “no more than” or “less than” is understood as the value adjacent to the phrase and logical lower values or integers, as logical from context, to zero. For example, a duplex region of “no more than 2 nucleotide base pairs” has a 2, 1, or 0 nucleotide base pairs. When “no more than” or “less than” is present before a series of numbers or a range, it is understood that each of the numbers in the series or range is modified.

[0220] As used herein, “detecting an analyte” and the like is understood as performing an assay in which the analyte can be detected, if present, wherein the analyte is present in an amount above the level of detection of the assay.

[0221] As used herein, “loss of function” is understood as an activity not being present, e.g., an enzyme activity not being present, for any reason. In certain embodiments, the absence of activity may be due to the absence of a protein having a function, e.g., protein is not transcribed or translated, protein is translated but not stable or not transported appropriately, either intracellularly or systemically. In certain embodiments, the absence of activity may be due to the presence of a mutation, e.g., point mutation, truncation, abnormal splicing, such that a protein is present, but not functional. A loss of function can be a partial or complete loss of function. In certain embodiments, various degrees of loss of function may be known that result in various conditions, severity of disease, or age of onset. As used herein, a loss of function is preferably not a transient loss of function, e.g., due to a stress response or other response that results in a temporary loss of a functional protein. Therapeutic interventions to correct for a loss of function of a protein may include compensation for the loss of function with the protein that is deficient, or with proteins that compensate for the loss of function, but that have a different sequence or structure than the protein for which the function is lost. It is understood that a loss of function of one protein may be compensated for by providing or altering the activity of another protein in the same biological pathway. In certain embodiments, the protein to compensate for the loss of function includes one or more of a truncation, mutation, or non-native sequence to direct trafficking of the protein, either intracellularly or systemically, to overcome the loss of function of the protein. The therapeutic intervention may or may not correct the loss of function of the protein in all cell types or tissues. The therapeutic intervention may include expression of the protein to compensate for a loss of function at a site remote from where the protein lacking function is typically expressed, e.g., where the deficiency results in dysfunction of a cell or organ. The therapeutic intervention may include expression of the protein in the liver to compensate for a loss of function at a site remote from the liver. A number of genetic mutations have been linked with specific loss of function mutations, in both humans and other species.

[0222] As used herein, “enzyme deficiency” is understood as an insufficient level of an enzyme activity due to a loss of function of the protein. An enzyme deficiency can be partial or total, and may result in differences in time of onset or severity of signs or symptoms of the enzyme deficiency depending on the level and site of the loss of function. As used herein, enzyme deficiency is preferably not a transient enzyme deficiency due to stress or other factors. A number of genetic mutations have been linked with enzyme deficiencies, in both humans and other species. In certain embodiments, enzyme deficiencies result in inborn errors of metabolism. In certain embodiments, enzyme deficiencies result in lysosomal storage diseases. In certain embodiments, enzyme deficiencies result in galactosemia. In certain embodiments, enzyme deficiencies result in bleeding disorders.

[0223] As used herein, it is understood that when the maximum amount of a value is represented by 100% (e.g., 100% inhibition or 100% encapsulation) that the value is limited by the method of detection. For example, 100% inhibition is understood as inhibition to a level below the level of detection of the assay, and 100% encapsulation is understood as no material intended for encapsulation can be detected outside the vesicles.

[0224] Unless otherwise apparent from the context, the term “about” encompasses values ± 5% of a stated value. In certain embodiments, the term “about” is understood to encompass tolerated variation or error within the art, e.g., 2 standard deviations from the mean, or the sensitivity of the method used to take a measurement, or a percent of a value as tolerated in the art, e.g., with age. When “about” is present before the first value of a series, it can be understood to modify each value in the series.

[0225] The term “and/or” refers to and encompasses any and all possible combinations of one or more of the associated listed items, as well as the lack of combinations when interpreted in the alternative (“or”).

[0226] The term “or” refers to any one member of a particular list and also includes any combination of members of that list.

[0227] The singular forms of the articles “a,” “an,” and “the” include plural references unless the context clearly dictates otherwise. For example, the term “a protein” or “at least one protein” can include a plurality of proteins, including mixtures thereof.

[0228] Statistically significant means p ≤0.05.

[0229] In the event of a conflict between a sequence in the application and an indicated accession number or position in an accession number, the sequence in the application predominates.

### DETAILED DESCRIPTION

### I. Overview

[0230] Compositions and methods for inserting a nucleic acid encoding a polypeptide of interest into a target genomic locus in a neonatal cell, a population of neonatal cells, or a neonatal subject or for expressing a nucleic acid encoding a polypeptide of interest in a neonatal cell, a population of neonatal cells, or a neonatal subject are provided. Also provided are methods of treating an enzyme deficiency, methods of treating a lysosomal storage disease, and methods of preventing or reducing the onset of a sign or symptom of an enzyme deficiency or a lysosomal storage disease in a subject. Also provided are neonatal cells or populations of neonatal cells comprising a nucleic acid construct comprising a coding sequence for a polypeptide of interest inserted into a target genomic locus.

[0231] In a specific example, compositions and methods for inserting a nucleic acid encoding a multidomain therapeutic protein (e.g., GAA fusion protein) into a target genomic locus in a neonatal cell, a population of neonatal cells, or a neonatal subject or for expressing a nucleic acid encoding a multidomain therapeutic protein (e.g., GAA fusion protein) from a target genomic locus in a neonatal cell, a population of neonatal cells, or a neonatal subject are also provided. Compositions and methods for treating GAA deficiency, reducing glycogen accumulation in a tissue, treating Pompe disease, or preventing or reducing the onset of a sign or symptom of Pompe disease in a neonatal subject are provided. Also provided are neonatal cells or populations of neonatal cells comprising a nucleic acid construct comprising a coding sequence for a multidomain therapeutic protein (e.g., GAA fusion protein) inserted into a target genomic locus.

[0232] The neonatal gene insertion platform described herein has advantages in terms of expression levels, durability of expression, and level of functional rescue of enzyme deficiencies over existing episomal platforms in neonates.

[0233] Also provided herein are nucleic acid constructs and compositions (e.g., episomal expression vectors) for expression of a multidomain therapeutic protein (e.g., GAA fusion protein). Also provided herein are nucleic acid constructs and compositions that allow insertion of a multidomain therapeutic protein (e.g., GAA fusion protein) coding sequence into a target genomic locus such as an endogenous ALB locus and/or expression of the multidomain therapeutic protein (e.g., GAA fusion protein) coding sequence. The nucleic acid constructs and compositions can be used in methods of integrating or inserting a multidomain therapeutic protein (e.g., GAA fusion protein) nucleic acid into a target genomic locus in a cell or a population of cells or a subject, methods of expressing a multidomain therapeutic protein (e.g., GAA fusion protein) in a cell or a population of cells or a subject, methods of reducing glycogen accumulation in a cell or a population of cells or a subject, methods of treating Pompe disease or GAA deficiency in a subject, and method of preventing or reducing the onset of a sign or symptom of Pompe disease in a subject, including neonatal cells and subjects.

[0234] More specifically, described herein in some embodiments is a therapeutic product based on the CRISPR/Cas9 gene editing technology and optionally contained in a lipid nanoparticle (LNP) delivery system, associated with a multidomain therapeutic protein (e.g., GAA fusion protein) DNA gene insertion template optionally contained in a recombinant adeno-associated virus serotype 8 (rAAV8). The CRISPR/Cas9 component has been designed to target and cut the double stranded DNA at a target gene locus (e.g., a safe harbor locus such as an ALB gene locus in hepatocytes), allowing for the multidomain therapeutic protein (e.g., GAA fusion protein) DNA template to be inserted in the genome at the target genomic locus. Transgene insertion provides a functional multidomain therapeutic protein (e.g., GAA fusion protein) gene, encoding the missing or defective genomic GAA in Pompe disease patients.

[0235] Some of the multidomain therapeutic protein (e.g., GAA fusion protein) coding sequences in the constructs disclosed herein are optimized for expression as compared to native GAA coding sequence. For example, the coding sequences in the constructs disclosed herein may include one or more modifications such as codon optimization (e.g., to human codons), depletion of CpG dinucleotides, mutation of cryptic splice sites, or any combination thereof. Other multidomain therapeutic protein coding sequences in the constructs disclosed herein comprise native GAA coding sequences.

### II. Compositions for Inserting Nucleic Acid Constructs Encoding and for Expressing Polypeptides of Interest in Cells or Neonatal Cells

[0236] Provided herein are nucleic acid constructs and compositions that allow insertion of a coding sequence for a polypeptide of interest into a target genomic locus such as an endogenous albumin (ALB) locus and/or expression of the coding sequence for the polypeptide of interest. Also provided herein are nucleic acid constructs and compositions (e.g. episomal expression vectors) for expression of a coding sequence for a polypeptide of interest. The nucleic acid constructs and compositions can be used in methods for integration into a target genomic locus and/or expression in a cell or a subject. Also provided are nuclease agents (e.g., targeting an endogenous ALB locus) or nucleic acids encoding nuclease agents to facilitate integration of the nucleic acid constructs into a target genomic locus such as an endogenous ALB locus.

[0237] Also provided herein are nucleic acid constructs and compositions that allow insertion of a multidomain therapeutic protein (e.g., GAA fusion protein) coding sequence into a target genomic locus such as an endogenous albumin (ALB) locus and/or expression of the multidomain therapeutic protein (e.g., GAA fusion protein) coding sequence. Also provided herein are nucleic acid constructs and compositions (e.g., episomal expression vectors) for expression of a multidomain therapeutic protein (e.g., GAA fusion protein). The nucleic acid constructs and compositions can be used in methods of introducing a nucleic acid construct comprising a multidomain therapeutic protein coding sequence into a cell or a population of cells or a subject, methods of inserting or integrating a nucleic acid construct comprising a multidomain therapeutic protein coding sequence into a target genomic locus, methods of expressing a multidomain therapeutic protein in a cell or a population of cells or a subject, methods of reducing glycogen accumulation in a cell or a population of cells or a tissue in a subject, and methods of treating Pompe disease or GAA deficiency in a subject. Also provided are nuclease agents (e.g., targeting an endogenous ALB locus) or nucleic acids encoding nuclease agents to facilitate integration of the nucleic acid constructs into a target genomic locus such as an endogenous ALB locus.

### A. Nucleic Acid Constructs Encoding a Polypeptide of Interest

[0238] The compositions and methods described herein include the use of a nucleic acid construct that comprises a coding sequence for a polypeptide of interest (e.g., an exogenous polypeptide coding sequence). The compositions and methods described herein can also include the use of a nucleic acid construct that comprises a polypeptide of interest coding sequence or a reverse complement of the polypeptide of interest coding sequence (e.g., an exogenous polypeptide coding sequence or a reverse complement of the exogenous polypeptide coding sequence). Such nucleic acid constructs can be for expression of the polypeptide of interest in a cell. Such nucleic acid constructs can be for insertion into a target genomic locus or into a cleavage site created by a nuclease agent or CRISPR/Cas system as disclosed elsewhere herein. The term cleavage site includes a DNA sequence at which a nick or double-strand break is created by a nuclease agent (e.g., a Cas9 protein complexed with a guide RNA). In some embodiments, a double-stranded break is created by a Cas9 protein complexed with a guide RNA, e.g., a Spy Cas9 protein complexed with a Spy Cas9 guide RNA. In some cases, the polypeptide of interest is an exogenous polypeptide as defined herein.

[0239] In a specific example, the compositions and methods described herein include the use of a nucleic acid construct that comprises a multidomain therapeutic protein coding sequence (a multidomain therapeutic protein nucleic acid). Such nucleic acid constructs can be for expression of the multidomain therapeutic protein in a cell. Such nucleic acid constructs can be for insertion into a target genomic locus following cleavage at a cleavage site by a nuclease agent or CRISPR/Cas system as disclosed elsewhere herein or can be for expression of the multidomain therapeutic protein without insertion into a target genomic locus or a cleavage site (e.g., in an episome). The term cleavage site includes a DNA sequence at which a nick or double-strand break is created by a nuclease agent (e.g., a Cas9 protein complexed with a guide RNA). In certain embodiments, the cleavage site includes a DNA sequence at which a double-strand break is created by a Cas9 protein complexed with a guide RNA, e.g., a Spy Cas9 protein complexed with a Spy Cas9 guide RNA.

[0240] The length of the nucleic acid constructs disclosed herein can vary. The construct can be, for example, from about 1 kb to about 5 kb, such as from about 1 kb to about 4.5 kb or about 1 kb to about 4 kb. An exemplary nucleic acid construct is between about 1 kb to about 5 kb in length or between about 1 kb to about 4 kb in length. Alternatively, a nucleic acid construct can be between about 1 kb to about 1.5 kb, about 1.5 kb to about 2 kb, about 2 kb to about 2.5 kb, about 2.5 kb to about 3 kb, about 3 kb to about 3.5 kb, about 3.5 kb to about 4 kb, about 4 kb to about 4.5 kb, or about 4.5 kb to about 5 kb in length. Alternatively, a nucleic acid construct can be, for example, no more than 5 kb, no more than 4.5 kb, no more than 4 kb, no more than 3.5 kb, no more than 3 kb, or no more than 2.5 kb in length.

[0241] The constructs can comprise deoxyribonucleic acid (DNA) or ribonucleic acid (RNA), can be single-stranded, double-stranded, or partially single-stranded and partially double-stranded, and can be introduced into a host cell in linear or circular (e.g., minicircle) form. See, e.g., US 2010/0047805, US 2011/0281361, and US 2011/0207221, each of which is herein incorporated by reference in their entirety for all purposes. If introduced in linear form, the ends of the construct can be protected (e.g., from exonucleolytic degradation) by known methods. For example, one or more dideoxynucleotide residues can be added to the 3′ terminus of a linear molecule and/or self-complementary oligonucleotides can be ligated to one or both ends. See, e.g., Chang et al. (1987) Proc. Natl. Acad. Sci. U.S.A. 84:4959-4963 and Nehls et al. (1996) Science 272:886-889, each of which is herein incorporated by reference in their entirety for all purposes. Additional methods for protecting exogenous polynucleotides from degradation include, but are not limited to, addition of terminal amino group(s) and the use of modified internucleotide linkages such as, for example, phosphorothioates, phosphoramidates, and O-methyl ribose or deoxyribose residues. A construct can be introduced into a cell as part of a vector molecule having additional sequences such as, for example, replication origins, promoters, and genes encoding antibiotic resistance. A construct may omit viral elements. Moreover, constructs can be introduced as a naked nucleic acid, can be introduced as a nucleic acid complexed with an agent such as a liposome or poloxamer, or can be delivered by viruses (e.g., adenovirus, adeno-associated virus (AAV), herpesvirus, retrovirus, or lentivirus).

[0242] The constructs disclosed herein can be modified on either or both ends to include one or more suitable structural features as needed and/or to confer one or more functional benefit. For example, structural modifications can vary depending on the method(s) used to deliver the constructs disclosed herein to a host cell (e.g., use of viral vector delivery or packaging into lipid nanoparticles for delivery). Such modifications include, for example, terminal structures such as inverted terminal repeats (ITR), hairpin, loops, and other structures such as toroids. For example, the constructs disclosed herein can comprise one, two, or three ITRs or can comprise no more than two ITRs. Various methods of structural modifications are known.

[0243] Some constructs may be inserted so that their expression is driven by the endogenous promoter at the insertion site (e.g., the endogenous ALB promoter when the construct is integrated into the host cell’s ALB locus). Such constructs may not comprise a promoter that drives the expression of the polypeptide of interest (e.g., multidomain therapeutic protein or GAA fusion protein). For example, the expression of the polypeptide of interest (e.g., multidomain therapeutic protein or GAA fusion protein) can be driven by a promoter of the host cell (e.g., the endogenous ALB promoter when the transgene is integrated into a host cell’s ALB locus). In such cases, the construct may lack control elements (e.g., promoter and/or enhancer) that drive its expression (e.g., a promoterless construct). Nonetheless, in other cases the construct may comprise a promoter and/or enhancer, for example a constitutive promoter or an inducible or tissue-specific (e.g., liver- or platelet-specific) promoter that drives expression of the polypeptide of interest (e.g., multidomain therapeutic protein or GAA fusion protein) in an episome or upon integration. For example, the construct may be a construct for expression (e.g., an episomal construct) but not for insertion. In some embodiments, the construct is not for insertion. Non-limiting exemplary constitutive promoters include cytomegalovirus immediate early promoter (CMV), simian virus (SV40) promoter, adenovirus major late (MLP) promoter, Rous sarcoma virus (RSV) promoter, mouse mammary tumor virus (MMTV) promoter, phosphoglycerate kinase (PGK) promoter, elongation factor-alpha (EF1a) promoter, ubiquitin promoters, actin promoters, tubulin promoters, immunoglobulin promoters, a functional fragment thereof, or a combination of any of the foregoing. For example, the promoter may be a CMV promoter or a truncated CMV promoter. In another example, the promoter may be an EF1a promoter. Non-limiting exemplary inducible promoters include those inducible by heat shock, light, chemicals, peptides, metals, steroids, antibiotics, or alcohol. The inducible promoter may be one that has a low basal (non-induced) expression level, such as the Tet-On® promoter (Clontech). Although not required for expression, the constructs may comprise transcriptional or translational regulatory sequences such as promoters, enhancers, insulators, internal ribosome entry sites, additional sequences encoding peptides, and/or polyadenylation signals. The construct may comprise a sequence encoding a polypeptide of interest (e.g., multidomain therapeutic protein or GAA fusion protein) downstream of and operably linked to a signal sequence encoding a signal peptide. In some examples, the nucleic acid construct works in homology-independent insertion of a nucleic acid that encodes a polypeptide of interest (e.g., multidomain therapeutic protein or GAA fusion protein). Such nucleic acid constructs can work, for example, in non-dividing cells (e.g., cells in which non-homologous end joining (NHEJ), not homologous recombination (HR), is the primary mechanism by which double-stranded DNA breaks are repaired) or dividing cells (e.g., actively dividing cells). Such constructs can be, for example, homology-independent donor constructs. In preferred embodiments, promoters and other regulatory sequences are appropriate for use in humans, e.g., recognized by regulatory factors in human cells, e.g., in human liver cells, and acceptable to regulatory authorities for use in humans. Examples of liver-specific promoters include TTR promoters, such as human or mouse TTR promoters. In one example, the construct may comprise a TTR promoter, such as a mouse TTR promoter or a human TTR promoter (e.g., the coding sequence for the polypeptide of interest or multidomain therapeutic protein is operably linked to the TTR promoter). In one example, the construct may comprise a SERPINA1 enhancer, such as a mouse SERPINA1 enhancer or a human SERPINA1 enhancer (e.g., the coding sequence for the polypeptide of interest or multidomain therapeutic protein is operably linked to the SERPINA1 enhancer). In one example, the construct may comprise a TTR promoter and a SERPINA1 enhancer, such as a human SERPINA1 enhancer and a mouse TTR promoter (e.g., the coding sequence for the polypeptide of interest or multidomain therapeutic protein is operably linked to the SERPINA1 enhancer and the TTR promoter).

[0244] The constructs disclosed herein can be modified to include or exclude any suitable structural feature as needed for any particular use and/or that confers one or more desired function. For example, some constructs disclosed herein do not comprise a homology arm. Some constructs disclosed herein are capable of insertion into a target genomic locus or a cut site in a target DNA sequence for a nuclease agent (e.g., capable of insertion into a safe harbor gene, such as an ALB locus) by non-homologous end joining. For example, such constructs can be inserted into a blunt end double-strand break following cleavage with a nuclease agent (e.g., CRISPR/Cas system, e.g., a SpyCas9 CRISPR/Cas system) as disclosed herein. In a specific example, the construct can be delivered via AAV and can be capable of insertion by non-homologous end joining (e.g., the construct does not comprise a homology arm).

[0245] In a particular example, the construct can be inserted via homology-independent targeted integration. For example, the polypeptide of interest coding sequence (e.g., the multidomain therapeutic protein or GAA fusion protein coding sequence) in the construct can be flanked on each side by a target site for a nuclease agent (e.g., the same target site as in the target DNA sequence for targeted insertion (e.g., in a safe harbor gene), and the same nuclease agent being used to cleave the target DNA sequence for targeted insertion). The nuclease agent can then cleave the target sites flanking the polypeptide of interest coding sequence (e.g., the multidomain therapeutic protein or GAA fusion protein coding sequence). In a specific example, the construct is delivered AAV-mediated delivery, and cleavage of the target sites flanking the polypeptide of interest coding sequence (e.g., the multidomain therapeutic protein or GAA fusion protein coding sequence) can remove the inverted terminal repeats (ITRs) of the AAV. In some instances, the target DNA sequence for targeted insertion (e.g., target DNA sequence in a safe harbor locus such as a gRNA target sequence including the flanking protospacer adjacent motif) is no longer present if the polypeptide of interest coding sequence (e.g., the multidomain therapeutic protein or GAA fusion protein coding sequence) is inserted into the cut site or target DNA sequence in the correct orientation but it is reformed if the polypeptide of interest coding sequence (e.g., the multidomain therapeutic protein or GAA fusion protein coding sequence) is inserted into the cut site or target DNA sequence in the opposite orientation. This can help ensure that the polypeptide of interest coding sequence (e.g., the multidomain therapeutic protein or GAA fusion protein coding sequence) is inserted in the correct orientation for expression.

[0246] The constructs disclosed herein can comprise a polyadenylation sequence or polyadenylation tail sequence (e.g., downstream or 3′ of a polypeptide of interest coding sequence). Methods of designing a suitable polyadenylation tail sequence are well-known. The polyadenylation tail sequence can be encoded, for example, as a “poly-A” stretch downstream of the polypeptide of interest coding sequence. A poly-A tail can comprise, for example, at least 20, 30, 40, 50, 60, 70, 80, 90, or 100 adenines, and optionally up to 300 adenines. In a specific example, the poly-A tail comprises 95, 96, 97, 98, 99, or 100 adenine nucleotides. Methods of designing a suitable polyadenylation tail sequence and/or polyadenylation signal sequence are well known. For example, the polyadenylation signal sequence AAUAAA is commonly used in mammalian systems, although variants such as UAUAAA or AU/GUAAA have been identified. See, e.g., Proudfoot (2011) Genes & Dev. 25(17):1770-82, herein incorporated by reference in its entirety for all purposes. The term polyadenylation signal sequence refers to any sequence that directs termination of transcription and addition of a poly-A tail to the mRNA transcript. In eukaryotes, transcription terminators are recognized by protein factors, and termination is followed by polyadenylation, a process of adding a poly(A) tail to the mRNA transcripts in presence of the poly(A) polymerase. The mammalian poly(A) signal typically consists of a core sequence, about 45 nucleotides long, that may be flanked by diverse auxiliary sequences that serve to enhance cleavage and polyadenylation efficiency. The core sequence consists of a highly conserved upstream element (AATAAA or AAUAAA) in the mRNA, referred to as a poly A recognition motif or poly A recognition sequence), recognized by cleavage and polyadenylation-specificity factor (CPSF), and a poorly defined downstream region (rich in Us or Gs and Us), bound by cleavage stimulation factor (CstF). Examples of transcription terminators that can be used include, for example, the human growth hormone (HGH) polyadenylation signal, the simian virus 40 (SV40) late polyadenylation signal, the rabbit beta-globin polyadenylation signal, the bovine growth hormone (BGH) polyadenylation signal, the phosphoglycerate kinase (PGK) polyadenylation signal, an AOX1 transcription termination sequence, a CYC1 transcription termination sequence, or any transcription termination sequence known to be suitable for regulating gene expression in eukaryotic cells. In one example, the polyadenylation signal is a simian virus 40 (SV40) late polyadenylation signal. For example, the polyadenylation signal can comprise, consist essentially of, or consist of SEQ ID NO: 712, 169, or 161. For example, the polyadenylation signal can comprise, consist essentially of, or consist of SEQ ID NO: 169 or 161. For example, the polyadenylation signal can comprise, consist essentially of, or consist of SEQ ID NO: 169. For example, the polyadenylation signal can comprise, consist essentially of, or consist of SEQ ID NO: 712. In another example, the polyadenylation signal is a bovine growth hormone (BGH) polyadenylation signal or a CpG depleted BGH polyadenylation signal. For example, the polyadenylation signal can comprise, consist essentially of, or consist of SEQ ID NO: 162.

[0247] The constructs disclosed herein may also comprise splice acceptor sites (e.g., operably linked to the polypeptide of interest coding sequence (e.g., the multidomain therapeutic protein or GAA fusion protein coding sequence), such as upstream or 5′ of the polypeptide of interest coding sequence (e.g., the multidomain therapeutic protein or GAA fusion protein coding sequence)). The splice acceptor site can, for example, comprise NAG or consist of NAG. In a specific example, the splice acceptor is an ALB splice acceptor (e.g., an ALB splice acceptor used in the splicing together of exons 1 and 2 of ALB (i.e., ALB exon 2 splice acceptor)). For example, such a splice acceptor can be derived from the human ALB gene. In another example, the splice acceptor can be derived from the mouse Alb gene (e.g., an ALB splice acceptor used in the splicing together of exons 1 and 2 of mouse Alb (i.e., mouse Alb exon 2 splice acceptor)). In another example, the splice acceptor is a splice acceptor from a gene encoding the polypeptide of interest (e.g., a GAA splice acceptor). For example, such a splice acceptor can be derived from the human GAA gene. Alternatively, such a splice acceptor can be derived from the mouse GAA gene. Additional suitable splice acceptor sites useful in eukaryotes, including artificial splice acceptors, are well-known. See, e.g., Shapiro et al. (1987) Nucleic Acids Res. 15:7155-7174 and Burset et al. (2001) Nucleic Acids Res. 29:255-259, each of which is herein incorporated by reference in its entirety for all purposes. In a specific example, the splice acceptor is a mouse Alb exon 2 splice acceptor. In a specific example, the splice acceptor can comprise, consist essentially of, or consist of SEQ ID NO: 163.

[0248] In some examples, the nucleic acid constructs disclosed herein can be bidirectional constructs, which are described in more detail below. In some examples, the nucleic acid constructs disclosed herein can be unidirectional constructs, which are described in more detail below. Likewise, in some examples, the nucleic acid constructs disclosed herein can be in a vector (e.g., viral vector, such as AAV, or rAAV8) and/or a lipid nanoparticle as described in more detail elsewhere herein.

### Polypeptides of Interest and Multidomain Therapeutic Proteins

[0249] Any polypeptide of interest may be encoded by the nucleic acid constructs disclosed herein. In one example, the polypeptide of interest is a therapeutic polypeptide (e.g., a polypeptide that is lacking or deficient in a neonatal subject). In one example, the polypeptide of interest is an enzyme.

[0250] The polypeptide of interest can be a secreted polypeptide (e.g., a protein that is secreted by the cell and/or is functionally active as a soluble extracellular protein). Alternatively, the polypeptide of interest can be an intracellular polypeptide (e.g., a protein that is not secreted by the cell and is functionally active within the cell, including soluble cytosolic polypeptides).

[0251] The polypeptide of interest can be a wild type polypeptide. Alternatively, the polypeptide of interest can be a variant or mutant polypeptide.

[0252] In one example, the polypeptide of interest is a liver protein (e.g., a protein that is, endogenously produced in the liver and/or functionally active in the liver). In another example, the polypeptide of interest can be a circulating protein that is produced by the liver. In another example, the polypeptide of interest can be a non-liver protein.

[0253] The polypeptide of interest can be an exogenous polypeptide. An “exogenous” polypeptide coding sequence can refer to a coding sequence that has been introduced from an exogenous source to a site within a host cell genome (e.g., at a genomic locus such as a safe harbor locus, including ALB intron 1). That is, the exogenous polypeptide coding sequence is exogenous with respect to its insertion site, and the polypeptide of interest expressed from such an exogenous coding sequence is referred to as an exogenous polypeptide. The exogenous coding sequence can be naturally-occurring or engineered, and can be wild type or a variant. The exogenous coding sequence may include nucleotide sequences other than the sequence that encodes the exogenous polypeptide (e.g., an internal ribosomal entry site). The exogenous coding sequence can be a coding sequence that occurs naturally in the host genome, as a wild type or a variant (e.g., mutant). For example, although the host cell contains the coding sequence of interest (as a wild type or as a variant), the same coding sequence or variant thereof can be introduced as an exogenous source (e.g., for expression at a locus that is highly expressed). The exogenous coding sequence can also be a coding sequence that is not naturally occurring in the host genome, or that expresses an exogenous polypeptide that does not naturally occur in the host genome. An exogenous coding sequence can include an exogenous nucleic acid sequence (e.g., a nucleic acid sequence is not endogenous to the recipient cell), or may be exogenous with respect to its insertion site and/or with respect to its recipient cell.

[0254] In one example, the polypeptide of interest is a polypeptide associated with a genetic enzyme deficiency. In certain embodiments, the genetic enzyme deficiency results in infantile onset of disease. In certain embodiments, the genetic enzyme deficiency can be, or routinely is, diagnosed with newborn screening. In certain embodiments, the enzyme deficiency may manifest in various severity of disease such that the age of onset may include an infantile onset form of the disease and a later onset form of the disease (e.g., childhood, adolescent, or adult form of onset).

[0255] In one example, the polypeptide of interest is a lysosomal alpha-glucosidase (GAA) polypeptide.

[0256] In another example, the polypeptide of interest is a multidomain therapeutic protein. A multidomain therapeutic protein as described herein includes a lysosomal alpha-glucosidase (GAA; e.g., to provide GAA enzyme replacement activity) linked to or fused to a delivery domain that provides binding to an internalization effector (a protein that is capable of being internalized into a cell or that otherwise participates in or contributes to retrograde membrane trafficking). Examples of multidomain therapeutic proteins can be found in WO 2013/138400, WO 2017/007796, WO 2017/190079, WO 2017/100467, WO 2018/226861, WO 2019/157224, and WO 2019/222663, each of which is herein incorporated by reference in its entirety for all purposes. For example, the multidomain therapeutic proteins described herein can comprise a CD63-binding delivery domain linked to or fused to a lysosomal alpha-glucosidase (GAA). CD63-binding domains and GAA are described in more detail below. The CD63-binding domain provides binding to the internalization factor CD63. The multidomain therapeutic protein is targeted to the muscle by targeting CD63, which is a rapidly internalizing protein highly expressed in the muscle. In some multidomain therapeutic proteins, the CD63-binding delivery domain is covalently linked to the GAA. The covalent linkage may be any type of covalent bond (i.e., any bond that involved sharing of electrons). In some cases, the covalent bond is a peptide bond between two amino acids, such that the GAA and the CD63-binding delivery domain in whole or in part form a continuous polypeptide chain, as in a fusion protein. In some cases, the GAA portion and the CD63-binding delivery domain portion are directly linked. In other cases, a linker, such as a peptide linker, is used to tether the two portions. Any suitable linker can be used. See Chen et al., “Fusion protein linkers: property, design and functionality,” 65(10) Adv Drug Deliv Rev. 1357-69 (2013). In some cases, a cleavable linker is used. For example, a cathepsin cleavable linker can be inserted between the CD63-binding delivery domain and the GAA to facilitate removal of the CD63-binding delivery domain in the lysosome. In another example, the linker can comprise an amino acid sequence, e.g., about 10 amino acids in length, for example, 1, 2, 3, 4, 5, 6, 7, 8, 8, or 10 repeats of Gly₄Ser (SEQ ID NO: 600). In one example, the linker comprises, consists essentially of, or consists of three such repeats (SEQ ID NO: 713). For example, the coding sequence for the linker can comprise, consist essentially of, or consist of any one of SEQ ID NOS: 715-719. In another example, the linker comprises, consists essentially of, or consists of two such repeats (SEQ ID NO: 714). For example, the coding sequence for the linker can comprise, consist essentially of, or consist of any one of SEQ ID NOS: 720-726. In another example, the linker comprises, consists essentially of, or consists of one such repeat (SEQ ID NO: 600). For example, the coding sequence for the linker can comprise, consist essentially of, or consist of SEQ ID NO: 727.

[0257] In a particular multidomain therapeutic protein, the GAA is covalently linked to the C-terminus of the heavy chain of an anti-CD63 antibody or to the C-terminus of the light chain. In another particular multidomain therapeutic protein, the GAA is covalently linked to the N-terminus of the heavy chain of an anti-CD63 antibody or to the N-terminus of the light chain. In another particular embodiment, the GAA is linked to the C-terminus of an anti-CD63 scFv domain.

[0258] As another example, the multidomain therapeutic proteins described herein can comprise a TfR-binding delivery domain linked to or fused to a lysosomal alpha-glucosidase (GAA). TfR-binding domains and GAA are described in more detail below. The TfR-binding domain provides binding to the internalization factor TfR. The multidomain therapeutic protein produced by the liver is targeted the muscle and CNS by targeting TfR, which is expressed in muscle and on brain endothelial cells. Transcytosis of TfR in these cells enables blood-brain-barrier crossing. In some multidomain therapeutic proteins, the TfR-binding delivery domain is covalently linked to the GAA. The covalent linkage may be any type of covalent bond (i.e., any bond that involved sharing of electrons). In some cases, the covalent bond is a peptide bond between two amino acids, such that the GAA and the TfR-binding delivery domain in whole or in part form a continuous polypeptide chain, as in a fusion protein. In some cases, the GAA portion and the TfR-binding delivery domain portion are directly linked. In other cases, a linker, such as a peptide linker, is used to tether the two portions. Any suitable linker can be used. See Chen et al., “Fusion protein linkers: property, design and functionality,” 65(10) Adv Drug Deliv Rev. 1357-69 (2013). In some cases, a cleavable linker is used. For example, a cathepsin cleavable linker can be inserted between the TfR-binding delivery domain and the GAA to facilitate removal of the TfR-binding delivery domain in the lysosome. In another example, the linker can comprise an amino acid sequence, e.g., about 10 amino acids in length, for example, 1, 2, 3, 4, 5, 6, 7, 8, 8, or 10 repeats of Gly₄Ser (SEQ ID NO: 600). In one example, the linker comprises, consists essentially of, or consists of three such repeats (SEQ ID NO: 713). For example, the coding sequence for the linker can comprise, consist essentially of, or consist of any one of SEQ ID NOS: 715-719. In another example, the linker comprises, consists essentially of, or consists of two such repeats (SEQ ID NO: 714). For example, the coding sequence for the linker can comprise, consist essentially of, or consist of any one of SEQ ID NOS: 720-726. In another example, the linker comprises, consists essentially of, or consists of one such repeat (SEQ ID NO: 600). For example, the coding sequence for the linker can comprise, consist essentially of, or consist of SEQ ID NO: 727.

[0259] In a particular multidomain therapeutic protein, the GAA is covalently linked to the C-terminus of the heavy chain of an anti-TfR antibody or to the C-terminus of the light chain. In another particular multidomain therapeutic protein, the GAA is covalently linked to the N-terminus of the heavy chain of an anti-TfR antibody or to the N-terminus of the light chain. In another particular embodiment, the GAA is linked to the C-terminus of an anti-TfR scFv domain.

### (A) Lysosomal Alpha-Glucosidase (GAA)

[0260] Lysosomal alpha-glucosidase (GAA; also known as acid alpha-glucosidase, acid alpha-glucosidase preproprotein, acid maltase, aglucosidase alfa, alpha-1,4-glucosidase, amyloglucosidase, glucoamylase, LYAG) is encoded by GAA. This enzyme is active in lysosomes, where it breaks down glycogen into glucose.

[0261] The human GAA gene (NCBI GenelD 2548) encodes a 952 amino acid protein. In the lysosome, human GAA is sequentially processed by proteases to polypeptides of 76-, 19.4-, and 3.9-kDa that remain associated. Further cleavage between R(200) and A(204) inefficiently converts the 76-kDa polypeptide to the mature 70-kDa form with an additional 10.4-kDa polypeptide. GAA maturation increases its affinity for glycogen by 7-10 fold. A signal peptide is encoded by amino acids 1-27, a propeptide encoded by amino acids 28-69, lysosomal alpha-glucosidase after removal of the signal peptide and propeptide is encoded by amino acids 70-952, the 76 kDa lysosomal alpha-glucosidase is encoded by amino acids 123-952, and the 70 kDa lysosomal alpha-glucosidase is encoded by amino acids 204-952.

[0262] The GAA expressed from the compositions and methods disclosed herein can be any wild type or variant GAA. In one example, the GAA is a human GAA protein. Human GAA is assigned UniProt reference number P10253. An exemplary amino acid sequence for human GAA is assigned NCBI Accession No. NP_000143.2 and is set forth in SEQ ID NO: 170. An exemplary human GAA mRNA (cDNA) sequence is assigned NCBI Accession No. NM_000152.5 and is set forth in SEQ ID NO: 171. An exemplary human GAA coding sequence is assigned CCDS ID CCDS32760.1 and is set forth in SEQ ID NO: 172. An exemplary mature human GAA amino acid sequence (i.e., the human GAA sequence after removal of the signal peptide and propeptide) starting at amino acid 70 (i.e., GAA 70-952) is set forth in SEQ ID NO: 173. An exemplary coding sequence for GAA 70-952 is set forth in SEQ ID NO: 174.

[0263] In some examples, the GAA (e.g., human GAA) is a wild type GAA (e.g., wild type human GAA) sequence or a fragment thereof. For example, the GAA can be a fragment comprising the mature GAA amino acid sequence (i.e., the GAA sequence after removal of the signal peptide and propeptide), a fragment comprising the 77 kDa form of GAA, or a fragment comprising the 70 kDa form of GAA. In a specific example, the GAA can comprise SEQ ID NO: 173 or can be at least 90%, at least 91%, at least 92%, at least 93%, at least 94%, at least 95%, at least 96%, at least 97%, at least 98%, at least 99%, or at least 99.5% identical to SEQ ID NO: 173. In another specific example, the GAA can consist essentially of SEQ ID NO: 173. In another specific example, the GAA can consist of SEQ ID NO: 173.

[0264] The GAA coding sequences in the constructs disclosed herein may include one or more modifications such as codon optimization (e.g., to human codons), depletion of CpG dinucleotides, mutation of cryptic splice sites, addition of one or more glycosylation sites, or any combination thereof. CpG dinucleotides in a construct can limit the therapeutic utility of the construct. First, unmethylated CpG dinucleotides can interact with host toll-like receptor-9 (TLR-9) to stimulate innate, proinflammatory immune responses. Second, once the CpG dinucleotides become methylated, they can result in the suppression of transgene expression coordinated by methyl-CpG binding proteins. Cryptic splice sites are sequences in a pre-messenger RNA that are not normally used as splice sites, but that can be activated, for example, by mutations that either inactivate canonical splice sites or create splice sites where one did not exist before. Accurate splice site selection is critical for successful gene expression, and removal of cryptic splice sites can favor use of the normal or intended splice site.

[0265] In one example, a GAA coding sequence in a construct disclosed herein has one or more cryptic splice sites mutated or removed. In another example, a GAA coding sequence in a construct disclosed herein has all identified cryptic splice sites mutated or removed. In another example, a GAA coding sequence in a construct disclosed herein has one or more CpG dinucleotides removed (i.e., is CpG depleted). In another example, a GAA coding sequence in a construct disclosed herein has all CpG dinucleotides removed (i.e., is fully CpG depleted). In another example, a GAA coding sequence in a construct disclosed herein is codon optimized (e.g., codon optimized for expression in a human or mammal). In a specific example, a GAA coding sequence in a construct disclosed herein has one or more CpG dinucleotides removed (i.e., is CpG depleted) and has one or more cryptic splice sites mutated or removed. In another specific example, a GAA coding sequence in a construct disclosed herein has all CpG dinucleotides removed and has one or more or all identified cryptic splice sites mutated or removed. In another specific example, a GAA coding sequence in a construct disclosed herein has one or more CpG dinucleotides removed (i.e., is CpG depleted) and is codon optimized (e.g., codon optimized for expression in a human or mammal). In another specific example, a GAA coding sequence in a construct disclosed herein has all CpG dinucleotides removed (i.e., is fully CpG depleted) and is codon optimized (e.g., codon optimized for expression in a human or mammal).

[0266] Various GAA coding sequences are provided. In one example, the GAA coding sequence is (or comprises a sequence) at least 90%, at least 91%, at least 92%, at least 93%, at least 94%, at least 95%, at least 96%, at least 97%, at least 98%, at least 99%, at least 99.5%, or 100% identical to any one of SEQ ID NOS: 174-182 and 205-212. In another example, the GAA coding sequence is (or comprises a sequence) at least 95%, at least 96%, at least 97%, at least 98%, at least 99%, at least 99.5%, or 100% identical to any one of SEQ ID NOS: 174-182 and 205-212. In another example, the GAA coding sequence is (or comprises a sequence) at least 99%, at least 99.5%, or 100% identical to any one of SEQ ID NOS: 174-182 and 205-212. In another example, the GAA coding sequence comprises the sequence set forth in any one of SEQ ID NOS: 174-182 and 205-212. In another example, the GAA coding sequence consists essentially of the sequence set forth in any one of SEQ ID NOS: 174-182 and 205-212. In another example, the GAA coding sequence consists of the sequence set forth in any one of SEQ ID NOS: 174-182 and 205-212. Various GAA coding sequences are provided. In one example, the GAA coding sequence is (or comprises a sequence) at least 90%, at least 91%, at least 92%, at least 93%, at least 94%, at least 95%, at least 96%, at least 97%, at least 98%, at least 99%, at least 99.5%, or 100% identical to any one of SEQ ID NOS: 174-182. In another example, the GAA coding sequence is (or comprises a sequence) at least 95%, at least 96%, at least 97%, at least 98%, at least 99%, at least 99.5%, or 100% identical to any one of SEQ ID NOS: 174-182. In another example, the GAA coding sequence is (or comprises a sequence) at least 99%, at least 99.5%, or 100% identical to any one of SEQ ID NOS: 174-182. In another example, the GAA coding sequence comprises the sequence set forth in any one of SEQ ID NOS: 174-182. In another example, the GAA coding sequence consists essentially of the sequence set forth in any one of SEQ ID NOS: 174-182. In another example, the GAA coding sequence consists of the sequence set forth in any one of SEQ ID NOS: 174-182. In one example, the GAA coding sequence is (or comprises a sequence) at least 90%, at least 91%, at least 92%, at least 93%, at least 94%, at least 95%, at least 96%, at least 97%, at least 98%, at least 99%, at least 99.5%, or 100% identical to SEQ ID NO: 176. In another example, the GAA coding sequence is (or comprises a sequence) at least 95%, at least 96%, at least 97%, at least 98%, at least 99%, at least 99.5%, or 100% identical to SEQ ID NO: 176. In another example, the GAA coding sequence is (or comprises a sequence) at least 99%, at least 99.5%, or 100% identical to SEQ ID NO: 176. In another example, the GAA coding sequence comprises the sequence set forth in SEQ ID NO: 176. In another example, the GAA coding sequence consists essentially of the sequence set forth in SEQ ID NO: 176. In another example, the GAA coding sequence consists of the sequence set forth in SEQ ID NO: 176. Optionally, the GAA coding sequence encodes a GAA protein (or a GAA protein comprising a sequence) at least 90%, at least 91%, at least 92%, at least 93%, at least 94%, at least 95%, at least 96%, at least 97%, at least 98%, at least 99%, at least 99.5%, or 100% identical to SEQ ID NO: 173 (and, e.g., retaining the activity of native GAA). Optionally, the GAA coding sequence encodes a GAA protein (or a GAA protein comprising a sequence) at least 95%, at least 96%, at least 97%, at least 98%, at least 99%, at least 99.5%, or 100% identical to SEQ ID NO: 173 (and, e.g., retaining the activity of native GAA). Optionally, the GAA coding sequence in the above examples encodes a GAA protein (or a GAA protein comprising a sequence) at least 99%, at least 99.5%, or 100% identical to SEQ ID NO: 173 (and, e.g., retaining the activity of native GAA). Optionally, the GAA coding sequence in the above examples encodes a GAA protein comprising the sequence set forth in SEQ ID NO: 173. Optionally, the GAA coding sequence in the above examples encodes a GAA protein consisting essentially of the sequence set forth in SEQ ID NO: 173. Optionally, the GAA coding sequence in the above examples encodes a GAA protein consisting of the sequence set forth in SEQ ID NO: 173.

[0267] Various codon optimized GAA coding sequences are provided. The GAA coding sequence can be, for example, CpG-depleted (e.g., fully CpG depleted) and/or codon optimized (e.g., CpG depleted (e.g., fully CpG-depleted) and codon optimized). In one example, the GAA coding sequence is (or comprises a sequence) at least 90%, at least 91%, at least 92%, at least 93%, at least 94%, at least 95%, at least 96%, at least 97%, at least 98%, at least 99%, at least 99.5%, or 100% identical to any one of SEQ ID NOS: 175-182. In another example, the GAA coding sequence is (or comprises a sequence) at least 95%, at least 96%, at least 97%, at least 98%, at least 99%, at least 99.5%, or 100% identical to any one of SEQ ID NOS: 175-182. In another example, the GAA coding sequence is (or comprises a sequence) at least 99%, at least 99.5%, or 100% identical to any one of SEQ ID NOS: 175-182. In another example, the GAA coding sequence comprises the sequence set forth in any one of SEQ ID NOS: 175-182. In another example, the GAA coding sequence consists essentially of the sequence set forth in any one of SEQ ID NOS: 175-182. In another example, the GAA coding sequence consists of the sequence set forth in any one of SEQ ID NOS: 175-182. Optionally, the GAA coding sequence encodes a GAA protein (or a GAA protein comprising a sequence) at least 90%, at least 91%, at least 92%, at least 93%, at least 94%, at least 95%, at least 96%, at least 97%, at least 98%, at least 99%, at least 99.5%, or 100% identical to SEQ ID NO: 173 (and, e.g., retaining the activity of native GAA). Optionally, the GAA coding sequence encodes a GAA protein (or a GAA protein comprising a sequence) at least 95%, at least 96%, at least 97%, at least 98%, at least 99%, at least 99.5%, or 100% identical to SEQ ID NO: 173 (and, e.g., retaining the activity of native GAA). Optionally, the GAA coding sequence in the above examples encodes a GAA protein (or a GAA protein comprising a sequence) at least 99%, at least 99.5%, or 100% identical to SEQ ID NO: 173 (and, e.g., retaining the activity of native GAA). Optionally, the GAA coding sequence in the above examples encodes a GAA protein comprising the sequence set forth in SEQ ID NO: 173. Optionally, the GAA coding sequence in the above examples encodes a GAA protein consisting essentially of the sequence set forth in SEQ ID NO: 173. Optionally, the GAA coding sequence in the above examples encodes a GAA protein consisting of the sequence set forth in SEQ ID NO: 173.

[0268] In one example, the GAA coding sequence is (or comprises a sequence) at least 90%, at least 91%, at least 92%, at least 93%, at least 94%, at least 95%, at least 96%, at least 97%, at least 98%, at least 99%, at least 99.5%, or 100% identical to SEQ ID NO: 176. In another example, the GAA coding sequence is (or comprises a sequence) at least 90%, at least 91%, at least 92%, at least 93%, at least 94%, at least 95%, at least 96%, at least 97%, at least 98%, at least 99%, at least 99.5%, or 100% identical to SEQ ID NO: 176 and encodes a GAA protein (or a GAA protein comprising a sequence) at least 99%, at least 99.5%, or 100% identical to SEQ ID NO: 173. In another example, the GAA coding sequence is (or comprises a sequence) at least 90%, at least 91%, at least 92%, at least 93%, at least 94%, at least 95%, at least 96%, at least 97%, at least 98%, at least 99%, at least 99.5%, or 100% identical to SEQ ID NO: 176 and encodes a GAA protein comprising the sequence set forth in SEQ ID NO: 173. In another example, the GAA coding sequence is (or comprises a sequence) at least 95%, at least 96%, at least 97%, at least 98%, at least 99%, at least 99.5%, or 100% identical to SEQ ID NO: 176. In another example, the GAA coding sequence is (or comprises a sequence) at least 95%, at least 96%, at least 97%, at least 98%, at least 99%, at least 99.5%, or 100% identical to SEQ ID NO: 176 and encodes a GAA protein (or a GAA protein comprising a sequence) at least 99%, at least 99.5%, or 100% identical to SEQ ID NO: 173. In another example, the GAA coding sequence is (or comprises a sequence) at least 95%, at least 96%, at least 97%, at least 98%, at least 99%, at least 99.5%, or 100% identical to SEQ ID NO: 176 and encodes a GAA protein comprising the sequence set forth in SEQ ID NO: 173. In another example, the GAA coding sequence is (or comprises a sequence) at least 99%, at least 99.5%, or 100% identical to SEQ ID NO: 176. In another example, the GAA coding sequence is (or comprises a sequence) at least 99%, at least 99.5%, or 100% identical to SEQ ID NO: 176 and encodes a GAA protein (or a GAA protein comprising a sequence) at least 99%, at least 99.5%, or 100% identical to SEQ ID NO: 173. In another example, the GAA coding sequence is (or comprises a sequence) at least 99%, at least 99.5%, or 100% identical to SEQ ID NO: 176 and encodes a GAA protein comprising the sequence set forth in SEQ ID NO: 173. In another example, the GAA coding sequence comprises the sequence set forth in SEQ ID NO: 176. In another example, the GAA coding sequence consists essentially of the sequence set forth in SEQ ID NO: 176. In another example, the GAA coding sequence consists of the sequence set forth in SEQ ID NO: 176. The GAA coding sequence can be, for example, CpG-depleted (e.g., fully CpG-depleted) and/or codon optimized. For example, the GAA coding sequence can be CpG depleted (e.g., fully CpG-depleted) and codon optimized. Optionally, the GAA coding sequence encodes a GAA protein (or a GAA protein comprising a sequence) at least 90%, at least 91%, at least 92%, at least 93%, at least 94%, at least 95%, at least 96%, at least 97%, at least 98%, at least 99%, at least 99.5%, or 100% identical to SEQ ID NO: 173 (and, e.g., retaining the activity of native GAA). Optionally, the GAA coding sequence encodes a GAA protein (or a GAA protein comprising a sequence) at least 95%, at least 96%, at least 97%, at least 98%, at least 99%, at least 99.5%, or 100% identical to SEQ ID NO: 173 (and, e.g., retaining the activity of native GAA). Optionally, the GAA coding sequence in the above examples encodes a GAA protein (or a GAA protein comprising a sequence) at least 99%, at least 99.5%, or 100% identical to SEQ ID NO: 173 (and, e.g., retaining the activity of native GAA). Optionally, the GAA coding sequence in the above examples encodes a GAA protein comprising the sequence set forth in SEQ ID NO: 173. Optionally, the GAA coding sequence in the above examples encodes a GAA protein consisting essentially of the sequence set forth in SEQ ID NO: 173. Optionally, the GAA coding sequence in the above examples encodes a GAA protein consisting of the sequence set forth in SEQ ID NO: 173.

[0269] In one example, the GAA coding sequence is (or comprises a sequence) at least 90%, at least 91%, at least 92%, at least 93%, at least 94%, at least 95%, at least 96%, at least 97%, at least 98%, at least 99%, at least 99.5%, or 100% identical to SEQ ID NO: 174. In another example, the GAA coding sequence is (or comprises a sequence) at least 90%, at least 91%, at least 92%, at least 93%, at least 94%, at least 95%, at least 96%, at least 97%, at least 98%, at least 99%, at least 99.5%, or 100% identical to SEQ ID NO: 174 and encodes a GAA protein (or a GAA protein comprising a sequence) at least 99%, at least 99.5%, or 100% identical to SEQ ID NO: 173. In another example, the GAA coding sequence is (or comprises a sequence) at least 90%, at least 91%, at least 92%, at least 93%, at least 94%, at least 95%, at least 96%, at least 97%, at least 98%, at least 99%, at least 99.5%, or 100% identical to SEQ ID NO: 174 and encodes a GAA protein comprising the sequence set forth in SEQ ID NO: 173. In another example, the GAA coding sequence is (or comprises a sequence) at least 95%, at least 96%, at least 97%, at least 98%, at least 99%, at least 99.5%, or 100% identical to SEQ ID NO: 174. In another example, the GAA coding sequence is (or comprises a sequence) at least 95%, at least 96%, at least 97%, at least 98%, at least 99%, at least 99.5%, or 100% identical to SEQ ID NO: 174 and encodes a GAA protein (or a GAA protein comprising a sequence) at least 99%, at least 99.5%, or 100% identical to SEQ ID NO: 173. In another example, the GAA coding sequence is (or comprises a sequence) at least 95%, at least 96%, at least 97%, at least 98%, at least 99%, at least 99.5%, or 100% identical to SEQ ID NO: 174 and encodes a GAA protein comprising the sequence set forth in SEQ ID NO: 173. In another example, the GAA coding sequence is (or comprises a sequence) at least 99%, at least 99.5%, or 100% identical to SEQ ID NO: 174. In another example, the GAA coding sequence is (or comprises a sequence) at least 99%, at least 99.5%, or 100% identical to SEQ ID NO: 174 and encodes a GAA protein (or a GAA protein comprising a sequence) at least 99%, at least 99.5%, or 100% identical to SEQ ID NO: 173. In another example, the GAA coding sequence is (or comprises a sequence) at least 99%, at least 99.5%, or 100% identical to SEQ ID NO: 174 and encodes a GAA protein comprising the sequence set forth in SEQ ID NO: 173. In another example, the GAA coding sequence comprises the sequence set forth in SEQ ID NO: 174. In another example, the GAA coding sequence consists essentially of the sequence set forth in SEQ ID NO: 174. In another example, the GAA coding sequence consists of the sequence set forth in SEQ ID NO: 174. The GAA coding sequence can be, for example, CpG-depleted (e.g., fully CpG-depleted) and/or codon optimized. For example, the GAA coding sequence can be CpG depleted (e.g., fully CpG-depleted) and codon optimized. Optionally, the GAA coding sequence encodes a GAA protein (or a GAA protein comprising a sequence) at least 90%, at least 91%, at least 92%, at least 93%, at least 94%, at least 95%, at least 96%, at least 97%, at least 98%, at least 99%, at least 99.5%, or 100% identical to SEQ ID NO: 173 (and, e.g., retaining the activity of native GAA). Optionally, the GAA coding sequence encodes a GAA protein (or a GAA protein comprising a sequence) at least 95%, at least 96%, at least 97%, at least 98%, at least 99%, at least 99.5%, or 100% identical to SEQ ID NO: 173 (and, e.g., retaining the activity of native GAA). Optionally, the GAA coding sequence in the above examples encodes a GAA protein (or a GAA protein comprising a sequence) at least 99%, at least 99.5%, or 100% identical to SEQ ID NO: 173 (and, e.g., retaining the activity of native GAA). Optionally, the GAA coding sequence in the above examples encodes a GAA protein comprising the sequence set forth in SEQ ID NO: 173. Optionally, the GAA coding sequence in the above examples encodes a GAA protein consisting essentially of the sequence set forth in SEQ ID NO: 173. Optionally, the GAA coding sequence in the above examples encodes a GAA protein consisting of the sequence set forth in SEQ ID NO: 173.

[0270] In one example, the GAA coding sequence is (or comprises a sequence) at least 90%, at least 91%, at least 92%, at least 93%, at least 94%, at least 95%, at least 96%, at least 97%, at least 98%, at least 99%, at least 99.5%, or 100% identical to SEQ ID NO: 181. In another example, the GAA coding sequence is (or comprises a sequence) at least 90%, at least 91%, at least 92%, at least 93%, at least 94%, at least 95%, at least 96%, at least 97%, at least 98%, at least 99%, at least 99.5%, or 100% identical to SEQ ID NO: 181 and encodes a GAA protein (or a GAA protein comprising a sequence) at least 99%, at least 99.5%, or 100% identical to SEQ ID NO: 173. In another example, the GAA coding sequence is (or comprises a sequence) at least 90%, at least 91%, at least 92%, at least 93%, at least 94%, at least 95%, at least 96%, at least 97%, at least 98%, at least 99%, at least 99.5%, or 100% identical to SEQ ID NO: 181 and encodes a GAA protein comprising the sequence set forth in SEQ ID NO: 173. In another example, the GAA coding sequence is (or comprises a sequence) at least 95%, at least 96%, at least 97%, at least 98%, at least 99%, at least 99.5%, or 100% identical to SEQ ID NO: 181. In another example, the GAA coding sequence is (or comprises a sequence) at least 95%, at least 96%, at least 97%, at least 98%, at least 99%, at least 99.5%, or 100% identical to SEQ ID NO: 181 and encodes a GAA protein (or a GAA protein comprising a sequence) at least 99%, at least 99.5%, or 100% identical to SEQ ID NO: 173. In another example, the GAA coding sequence is (or comprises a sequence) at least 95%, at least 96%, at least 97%, at least 98%, at least 99%, at least 99.5%, or 100% identical to SEQ ID NO: 181 and encodes a GAA protein comprising the sequence set forth in SEQ ID NO: 173. In another example, the GAA coding sequence is (or comprises a sequence) at least 99%, at least 99.5%, or 100% identical to SEQ ID NO: 181. In another example, the GAA coding sequence is (or comprises a sequence) at least 99%, at least 99.5%, or 100% identical to SEQ ID NO: 181 and encodes a GAA protein (or a GAA protein comprising a sequence) at least 99%, at least 99.5%, or 100% identical to SEQ ID NO: 173. In another example, the GAA coding sequence is (or comprises a sequence) at least 99%, at least 99.5%, or 100% identical to SEQ ID NO: 181 and encodes a GAA protein comprising the sequence set forth in SEQ ID NO: 173. In another example, the GAA coding sequence comprises the sequence set forth in SEQ ID NO: 181. In another example, the GAA coding sequence consists essentially of the sequence set forth in SEQ ID NO: 181. In another example, the GAA coding sequence consists of the sequence set forth in SEQ ID NO: 181. The GAA coding sequence can be, for example, CpG-depleted (e.g., fully CpG-depleted) and/or codon optimized. For example, the GAA coding sequence can be CpG depleted (e.g., fully CpG-depleted) and codon optimized. Optionally, the GAA coding sequence encodes a GAA protein (or a GAA protein comprising a sequence) at least 90%, at least 91%, at least 92%, at least 93%, at least 94%, at least 95%, at least 96%, at least 97%, at least 98%, at least 99%, at least 99.5%, or 100% identical to SEQ ID NO: 173 (and, e.g., retaining the activity of native GAA). Optionally, the GAA coding sequence encodes a GAA protein (or a GAA protein comprising a sequence) at least 95%, at least 96%, at least 97%, at least 98%, at least 99%, at least 99.5%, or 100% identical to SEQ ID NO: 173 (and, e.g., retaining the activity of native GAA). Optionally, the GAA coding sequence in the above examples encodes a GAA protein (or a GAA protein comprising a sequence) at least 99%, at least 99.5%, or 100% identical to SEQ ID NO: 173 (and, e.g., retaining the activity of native GAA). Optionally, the GAA coding sequence in the above examples encodes a GAA protein comprising the sequence set forth in SEQ ID NO: 173. Optionally, the GAA coding sequence in the above examples encodes a GAA protein consisting essentially of the sequence set forth in SEQ ID NO: 173. Optionally, the GAA coding sequence in the above examples encodes a GAA protein consisting of the sequence set forth in SEQ ID NO: 173.

[0271] In one example, the GAA coding sequence is (or comprises a sequence) at least 90%, at least 91%, at least 92%, at least 93%, at least 94%, at least 95%, at least 96%, at least 97%, at least 98%, at least 99%, at least 99.5%, or 100% identical to SEQ ID NO: 180. In another example, the GAA coding sequence is (or comprises a sequence) at least 90%, at least 91%, at least 92%, at least 93%, at least 94%, at least 95%, at least 96%, at least 97%, at least 98%, at least 99%, at least 99.5%, or 100% identical to SEQ ID NO: 180 and encodes a GAA protein (or a GAA protein comprising a sequence) at least 99%, at least 99.5%, or 100% identical to SEQ ID NO: 173. In another example, the GAA coding sequence is (or comprises a sequence) at least 90%, at least 91%, at least 92%, at least 93%, at least 94%, at least 95%, at least 96%, at least 97%, at least 98%, at least 99%, at least 99.5%, or 100% identical to SEQ ID NO: 180 and encodes a GAA protein comprising the sequence set forth in SEQ ID NO: 173. In another example, the GAA coding sequence is (or comprises a sequence) at least 95%, at least 96%, at least 97%, at least 98%, at least 99%, at least 99.5%, or 100% identical to SEQ ID NO: 180. In another example, the GAA coding sequence is (or comprises a sequence) at least 95%, at least 96%, at least 97%, at least 98%, at least 99%, at least 99.5%, or 100% identical to SEQ ID NO: 180 and encodes a GAA protein (or a GAA protein comprising a sequence) at least 99%, at least 99.5%, or 100% identical to SEQ ID NO: 173. In another example, the GAA coding sequence is (or comprises a sequence) at least 95%, at least 96%, at least 97%, at least 98%, at least 99%, at least 99.5%, or 100% identical to SEQ ID NO: 180 and encodes a GAA protein comprising the sequence set forth in SEQ ID NO: 173. In another example, the GAA coding sequence is (or comprises a sequence) at least 99%, at least 99.5%, or 100% identical to SEQ ID NO: 180. In another example, the GAA coding sequence is (or comprises a sequence) at least 99%, at least 99.5%, or 100% identical to SEQ ID NO: 180 and encodes a GAA protein (or a GAA protein comprising a sequence) at least 99%, at least 99.5%, or 100% identical to SEQ ID NO: 173. In another example, the GAA coding sequence is (or comprises a sequence) at least 99%, at least 99.5%, or 100% identical to SEQ ID NO: 180 and encodes a GAA protein comprising the sequence set forth in SEQ ID NO: 173. In another example, the GAA coding sequence comprises the sequence set forth in SEQ ID NO: 180. In another example, the GAA coding sequence consists essentially of the sequence set forth in SEQ ID NO: 180. In another example, the GAA coding sequence consists of the sequence set forth in SEQ ID NO: 180. The GAA coding sequence can be, for example, CpG-depleted (e.g., fully CpG-depleted) and/or codon optimized. For example, the GAA coding sequence can be CpG depleted (e.g., fully CpG-depleted) and codon optimized. Optionally, the GAA coding sequence encodes a GAA protein (or a GAA protein comprising a sequence) at least 90%, at least 91%, at least 92%, at least 93%, at least 94%, at least 95%, at least 96%, at least 97%, at least 98%, at least 99%, at least 99.5%, or 100% identical to SEQ ID NO: 173 (and, e.g., retaining the activity of native GAA). Optionally, the GAA coding sequence encodes a GAA protein (or a GAA protein comprising a sequence) at least 95%, at least 96%, at least 97%, at least 98%, at least 99%, at least 99.5%, or 100% identical to SEQ ID NO: 173 (and, e.g., retaining the activity of native GAA). Optionally, the GAA coding sequence in the above examples encodes a GAA protein (or a GAA protein comprising a sequence) at least 99%, at least 99.5%, or 100% identical to SEQ ID NO: 173 (and, e.g., retaining the activity of native GAA). Optionally, the GAA coding sequence in the above examples encodes a GAA protein comprising the sequence set forth in SEQ ID NO: 173. Optionally, the GAA coding sequence in the above examples encodes a GAA protein consisting essentially of the sequence set forth in SEQ ID NO: 173. Optionally, the GAA coding sequence in the above examples encodes a GAA protein consisting of the sequence set forth in SEQ ID NO: 173.

[0272] In one example, the GAA coding sequence is (or comprises a sequence) at least 90%, at least 91%, at least 92%, at least 93%, at least 94%, at least 95%, at least 96%, at least 97%, at least 98%, at least 99%, at least 99.5%, or 100% identical to SEQ ID NO: 178. In another example, the GAA coding sequence is (or comprises a sequence) at least 90%, at least 91%, at least 92%, at least 93%, at least 94%, at least 95%, at least 96%, at least 97%, at least 98%, at least 99%, at least 99.5%, or 100% identical to SEQ ID NO: 178 and encodes a GAA protein (or a GAA protein comprising a sequence) at least 99%, at least 99.5%, or 100% identical to SEQ ID NO: 173. In another example, the GAA coding sequence is (or comprises a sequence) at least 90%, at least 91%, at least 92%, at least 93%, at least 94%, at least 95%, at least 96%, at least 97%, at least 98%, at least 99%, at least 99.5%, or 100% identical to SEQ ID NO: 178 and encodes a GAA protein comprising the sequence set forth in SEQ ID NO: 173. In another example, the GAA coding sequence is (or comprises a sequence) at least 95%, at least 96%, at least 97%, at least 98%, at least 99%, at least 99.5%, or 100% identical to SEQ ID NO: 178. In another example, the GAA coding sequence is (or comprises a sequence) at least 95%, at least 96%, at least 97%, at least 98%, at least 99%, at least 99.5%, or 100% identical to SEQ ID NO: 178 and encodes a GAA protein (or a GAA protein comprising a sequence) at least 99%, at least 99.5%, or 100% identical to SEQ ID NO: 173. In another example, the GAA coding sequence is (or comprises a sequence) at least 95%, at least 96%, at least 97%, at least 98%, at least 99%, at least 99.5%, or 100% identical to SEQ ID NO: 178 and encodes a GAA protein comprising the sequence set forth in SEQ ID NO: 173. In another example, the GAA coding sequence is (or comprises a sequence) at least 99%, at least 99.5%, or 100% identical to SEQ ID NO: 178. In another example, the GAA coding sequence is (or comprises a sequence) at least 99%, at least 99.5%, or 100% identical to SEQ ID NO: 178 and encodes a GAA protein (or a GAA protein comprising a sequence) at least 99%, at least 99.5%, or 100% identical to SEQ ID NO: 173. In another example, the GAA coding sequence is (or comprises a sequence) at least 99%, at least 99.5%, or 100% identical to SEQ ID NO: 178 and encodes a GAA protein comprising the sequence set forth in SEQ ID NO: 173. In another example, the GAA coding sequence comprises the sequence set forth in SEQ ID NO: 178. In another example, the GAA coding sequence consists essentially of the sequence set forth in SEQ ID NO: 178. In another example, the GAA coding sequence consists of the sequence set forth in SEQ ID NO: 178. The GAA coding sequence can be, for example, CpG-depleted (e.g., fully CpG-depleted) and/or codon optimized. For example, the GAA coding sequence can be CpG depleted (e.g., fully CpG-depleted) and codon optimized. Optionally, the GAA coding sequence encodes a GAA protein (or a GAA protein comprising a sequence) at least 90%, at least 91%, at least 92%, at least 93%, at least 94%, at least 95%, at least 96%, at least 97%, at least 98%, at least 99%, at least 99.5%, or 100% identical to SEQ ID NO: 173 (and, e.g., retaining the activity of native GAA). Optionally, the GAA coding sequence encodes a GAA protein (or a GAA protein comprising a sequence) at least 95%, at least 96%, at least 97%, at least 98%, at least 99%, at least 99.5%, or 100% identical to SEQ ID NO: 173 (and, e.g., retaining the activity of native GAA). Optionally, the GAA coding sequence in the above examples encodes a GAA protein (or a GAA protein comprising a sequence) at least 99%, at least 99.5%, or 100% identical to SEQ ID NO: 173 (and, e.g., retaining the activity of native GAA). Optionally, the GAA coding sequence in the above examples encodes a GAA protein comprising the sequence set forth in SEQ ID NO: 173. Optionally, the GAA coding sequence in the above examples encodes a GAA protein consisting essentially of the sequence set forth in SEQ ID NO: 173. Optionally, the GAA coding sequence in the above examples encodes a GAA protein consisting of the sequence set forth in SEQ ID NO: 173.

[0273] Various other GAA coding sequences are provided. In one example, the GAA coding sequence is (or comprises a sequence) at least 90%, at least 91%, at least 92%, at least 93%, at least 94%, at least 95%, at least 96%, at least 97%, at least 98%, at least 99%, at least 99.5%, or 100% identical to any one of SEQ ID NOS: 174 and 205-212. In another example, the GAA coding sequence is (or comprises a sequence) at least 95%, at least 96%, at least 97%, at least 98%, at least 99%, at least 99.5%, or 100% identical to any one of SEQ ID NOS: 174 and 205-212. In another example, the GAA coding sequence is (or comprises a sequence) at least 99%, at least 99.5%, or 100% identical to any one of SEQ ID NOS: 174 and 205-212. In another example, the GAA coding sequence comprises the sequence set forth in any one of SEQ ID NOS: 174 and 205-212. In another example, the GAA coding sequence consists essentially of the sequence set forth in any one of SEQ ID NOS: 174 and 205-212. In another example, the GAA coding sequence consists of the sequence set forth in any one of SEQ ID NOS: 174 and 205-212. Optionally, the GAA coding sequence encodes a GAA protein (or a GAA protein comprising a sequence) at least 90%, at least 91%, at least 92%, at least 93%, at least 94%, at least 95%, at least 96%, at least 97%, at least 98%, at least 99%, at least 99.5%, or 100% identical to SEQ ID NO: 173 (and, e.g., retaining the activity of native GAA). Optionally, the GAA coding sequence encodes a GAA protein (or a GAA protein comprising a sequence) at least 95%, at least 96%, at least 97%, at least 98%, at least 99%, at least 99.5%, or 100% identical to SEQ ID NO: 173 (and, e.g., retaining the activity of native GAA). Optionally, the GAA coding sequence in the above examples encodes a GAA protein (or a GAA protein comprising a sequence) at least 99%, at least 99.5%, or 100% identical to SEQ ID NO: 173 (and, e.g., retaining the activity of native GAA). Optionally, the GAA coding sequence in the above examples encodes a GAA protein comprising the sequence set forth in SEQ ID NO: 173. Optionally, the GAA coding sequence in the above examples encodes a GAA protein consisting essentially of the sequence set forth in SEQ ID NO: 173. Optionally, the GAA coding sequence in the above examples encodes a GAA protein consisting of the sequence set forth in SEQ ID NO: 173.

[0274] Various other codon optimized GAA coding sequences are provided. The GAA coding sequence can be, for example, CpG-depleted (e.g., fully CpG depleted) and/or codon optimized (e.g., CpG depleted (e.g., fully CpG-depleted) and codon optimized). In one example, the GAA coding sequence is (or comprises a sequence) at least 90%, at least 91%, at least 92%, at least 93%, at least 94%, at least 95%, at least 96%, at least 97%, at least 98%, at least 99%, at least 99.5%, or 100% identical to any one of SEQ ID NOS: 205-212. In another example, the GAA coding sequence is (or comprises a sequence) at least 95%, at least 96%, at least 97%, at least 98%, at least 99%, at least 99.5%, or 100% identical to any one of SEQ ID NOS: 205-212. In another example, the GAA coding sequence is (or comprises a sequence) at least 99%, at least 99.5%, or 100% identical to any one of SEQ ID NOS: 205-212. In another example, the GAA coding sequence comprises the sequence set forth in any one of SEQ ID NOS: 205-212. In another example, the GAA coding sequence consists essentially of the sequence set forth in any one of SEQ ID NOS: 205-212. In another example, the GAA coding sequence consists of the sequence set forth in any one of SEQ ID NOS: 205-212. Optionally, the GAA coding sequence encodes a GAA protein (or a GAA protein comprising a sequence) at least 90%, at least 91%, at least 92%, at least 93%, at least 94%, at least 95%, at least 96%, at least 97%, at least 98%, at least 99%, at least 99.5%, or 100% identical to SEQ ID NO: 173 (and, e.g., retaining the activity of native GAA). Optionally, the GAA coding sequence encodes a GAA protein (or a GAA protein comprising a sequence) at least 95%, at least 96%, at least 97%, at least 98%, at least 99%, at least 99.5%, or 100% identical to SEQ ID NO: 173 (and, e.g., retaining the activity of native GAA). Optionally, the GAA coding sequence in the above examples encodes a GAA protein (or a GAA protein comprising a sequence) at least 99%, at least 99.5%, or 100% identical to SEQ ID NO: 173 (and, e.g., retaining the activity of native GAA). Optionally, the GAA coding sequence in the above examples encodes a GAA protein comprising the sequence set forth in SEQ ID NO: 173. Optionally, the GAA coding sequence in the above examples encodes a GAA protein consisting essentially of the sequence set forth in SEQ ID NO: 173. Optionally, the GAA coding sequence in the above examples encodes a GAA protein consisting of the sequence set forth in SEQ ID NO: 173.

[0275] In one example, the GAA coding sequence is (or comprises a sequence) at least 90%, at least 91%, at least 92%, at least 93%, at least 94%, at least 95%, at least 96%, at least 97%, at least 98%, at least 99%, at least 99.5%, or 100% identical to SEQ ID NO: 176. In another example, the GAA coding sequence is (or comprises a sequence) at least 90%, at least 91%, at least 92%, at least 93%, at least 94%, at least 95%, at least 96%, at least 97%, at least 98%, at least 99%, at least 99.5%, or 100% identical to SEQ ID NO: 176 and encodes a GAA protein (or a GAA protein comprising a sequence) at least 99%, at least 99.5%, or 100% identical to SEQ ID NO: 173. In another example, the GAA coding sequence is (or comprises a sequence) at least 90%, at least 91%, at least 92%, at least 93%, at least 94%, at least 95%, at least 96%, at least 97%, at least 98%, at least 99%, at least 99.5%, or 100% identical to SEQ ID NO: 176 and encodes a GAA protein comprising the sequence set forth in SEQ ID NO: 173. In another example, the GAA coding sequence is (or comprises a sequence) at least 95%, at least 96%, at least 97%, at least 98%, at least 99%, at least 99.5%, or 100% identical to SEQ ID NO: 176. In another example, the GAA coding sequence is (or comprises a sequence) at least 95%, at least 96%, at least 97%, at least 98%, at least 99%, at least 99.5%, or 100% identical to SEQ ID NO: 176 and encodes a GAA protein (or a GAA protein comprising a sequence) at least 99%, at least 99.5%, or 100% identical to SEQ ID NO: 173. In another example, the GAA coding sequence is (or comprises a sequence) at least 95%, at least 96%, at least 97%, at least 98%, at least 99%, at least 99.5%, or 100% identical to SEQ ID NO: 176 and encodes a GAA protein comprising the sequence set forth in SEQ ID NO: 173. In another example, the GAA coding sequence is (or comprises a sequence) at least 99%, at least 99.5%, or 100% identical to SEQ ID NO: 176. In another example, the GAA coding sequence is (or comprises a sequence) at least 99%, at least 99.5%, or 100% identical to SEQ ID NO: 176 and encodes a GAA protein (or a GAA protein comprising a sequence) at least 99%, at least 99.5%, or 100% identical to SEQ ID NO: 173. In another example, the GAA coding sequence is (or comprises a sequence) at least 99%, at least 99.5%, or 100% identical to SEQ ID NO: 176 and encodes a GAA protein comprising the sequence set forth in SEQ ID NO: 173. In another example, the GAA coding sequence comprises the sequence set forth in SEQ ID NO: 176. In another example, the GAA coding sequence consists essentially of the sequence set forth in SEQ ID NO: 176. In another example, the GAA coding sequence consists of the sequence set forth in SEQ ID NO: 176. The GAA coding sequence can be, for example, CpG-depleted (e.g., fully CpG-depleted) and/or codon optimized. For example, the GAA coding sequence can be CpG depleted (e.g., fully CpG-depleted) and codon optimized. Optionally, the GAA coding sequence encodes a GAA protein (or a GAA protein comprising a sequence) at least 90%, at least 91%, at least 92%, at least 93%, at least 94%, at least 95%, at least 96%, at least 97%, at least 98%, at least 99%, at least 99.5%, or 100% identical to SEQ ID NO: 173 (and, e.g., retaining the activity of native GAA). Optionally, the GAA coding sequence encodes a GAA protein (or a GAA protein comprising a sequence) at least 95%, at least 96%, at least 97%, at least 98%, at least 99%, at least 99.5%, or 100% identical to SEQ ID NO: 173 (and, e.g., retaining the activity of native GAA). Optionally, the GAA coding sequence in the above examples encodes a GAA protein (or a GAA protein comprising a sequence) at least 99%, at least 99.5%, or 100% identical to SEQ ID NO: 173 (and, e.g., retaining the activity of native GAA). Optionally, the GAA coding sequence in the above examples encodes a GAA protein comprising the sequence set forth in SEQ ID NO: 173. Optionally, the GAA coding sequence in the above examples encodes a GAA protein consisting essentially of the sequence set forth in SEQ ID NO: 173. Optionally, the GAA coding sequence in the above examples encodes a GAA protein consisting of the sequence set forth in SEQ ID NO: 173.

[0276] In one example, the GAA coding sequence is (or comprises a sequence) at least 90%, at least 91%, at least 92%, at least 93%, at least 94%, at least 95%, at least 96%, at least 97%, at least 98%, at least 99%, at least 99.5%, or 100% identical to SEQ ID NO: 174. In another example, the GAA coding sequence is (or comprises a sequence) at least 90%, at least 91%, at least 92%, at least 93%, at least 94%, at least 95%, at least 96%, at least 97%, at least 98%, at least 99%, at least 99.5%, or 100% identical to SEQ ID NO: 174 and encodes a GAA protein (or a GAA protein comprising a sequence) at least 99%, at least 99.5%, or 100% identical to SEQ ID NO: 173. In another example, the GAA coding sequence is (or comprises a sequence) at least 90%, at least 91%, at least 92%, at least 93%, at least 94%, at least 95%, at least 96%, at least 97%, at least 98%, at least 99%, at least 99.5%, or 100% identical to SEQ ID NO: 174 and encodes a GAA protein comprising the sequence set forth in SEQ ID NO: 173. In another example, the GAA coding sequence is (or comprises a sequence) at least 95%, at least 96%, at least 97%, at least 98%, at least 99%, at least 99.5%, or 100% identical to SEQ ID NO: 174. In another example, the GAA coding sequence is (or comprises a sequence) at least 95%, at least 96%, at least 97%, at least 98%, at least 99%, at least 99.5%, or 100% identical to SEQ ID NO: 174 and encodes a GAA protein (or a GAA protein comprising a sequence) at least 99%, at least 99.5%, or 100% identical to SEQ ID NO: 173. In another example, the GAA coding sequence is (or comprises a sequence) at least 95%, at least 96%, at least 97%, at least 98%, at least 99%, at least 99.5%, or 100% identical to SEQ ID NO: 174 and encodes a GAA protein comprising the sequence set forth in SEQ ID NO: 173. In another example, the GAA coding sequence is (or comprises a sequence) at least 99%, at least 99.5%, or 100% identical to SEQ ID NO: 174. In another example, the GAA coding sequence is (or comprises a sequence) at least 99%, at least 99.5%, or 100% identical to SEQ ID NO: 174 and encodes a GAA protein (or a GAA protein comprising a sequence) at least 99%, at least 99.5%, or 100% identical to SEQ ID NO: 173. In another example, the GAA coding sequence is (or comprises a sequence) at least 99%, at least 99.5%, or 100% identical to SEQ ID NO: 174 and encodes a GAA protein comprising the sequence set forth in SEQ ID NO: 173. In another example, the GAA coding sequence comprises the sequence set forth in SEQ ID NO: 174. In another example, the GAA coding sequence consists essentially of the sequence set forth in SEQ ID NO: 174. In another example, the GAA coding sequence consists of the sequence set forth in SEQ ID NO: 174. The GAA coding sequence can be, for example, CpG-depleted (e.g., fully CpG-depleted) and/or codon optimized. For example, the GAA coding sequence can be CpG depleted (e.g., fully CpG-depleted) and codon optimized. Optionally, the GAA coding sequence encodes a GAA protein (or a GAA protein comprising a sequence) at least 90%, at least 91%, at least 92%, at least 93%, at least 94%, at least 95%, at least 96%, at least 97%, at least 98%, at least 99%, at least 99.5%, or 100% identical to SEQ ID NO: 173 (and, e.g., retaining the activity of native GAA). Optionally, the GAA coding sequence encodes a GAA protein (or a GAA protein comprising a sequence) at least 95%, at least 96%, at least 97%, at least 98%, at least 99%, at least 99.5%, or 100% identical to SEQ ID NO: 173 (and, e.g., retaining the activity of native GAA). Optionally, the GAA coding sequence in the above examples encodes a GAA protein (or a GAA protein comprising a sequence) at least 99%, at least 99.5%, or 100% identical to SEQ ID NO: 173 (and, e.g., retaining the activity of native GAA). Optionally, the GAA coding sequence in the above examples encodes a GAA protein comprising the sequence set forth in SEQ ID NO: 173. Optionally, the GAA coding sequence in the above examples encodes a GAA protein consisting essentially of the sequence set forth in SEQ ID NO: 173. Optionally, the GAA coding sequence in the above examples encodes a GAA protein consisting of the sequence set forth in SEQ ID NO: 173.

[0277] In one example, the GAA coding sequence is (or comprises a sequence) at least 90%, at least 91%, at least 92%, at least 93%, at least 94%, at least 95%, at least 96%, at least 97%, at least 98%, at least 99%, at least 99.5%, or 100% identical to SEQ ID NO: 205. In another example, the GAA coding sequence is (or comprises a sequence) at least 90%, at least 91%, at least 92%, at least 93%, at least 94%, at least 95%, at least 96%, at least 97%, at least 98%, at least 99%, at least 99.5%, or 100% identical to SEQ ID NO: 205 and encodes a GAA protein (or a GAA protein comprising a sequence) at least 99%, at least 99.5%, or 100% identical to SEQ ID NO: 173. In another example, the GAA coding sequence is (or comprises a sequence) at least 90%, at least 91%, at least 92%, at least 93%, at least 94%, at least 95%, at least 96%, at least 97%, at least 98%, at least 99%, at least 99.5%, or 100% identical to SEQ ID NO: 205 and encodes a GAA protein comprising the sequence set forth in SEQ ID NO: 173. In another example, the GAA coding sequence is (or comprises a sequence) at least 95%, at least 96%, at least 97%, at least 98%, at least 99%, at least 99.5%, or 100% identical to SEQ ID NO: 205. In another example, the GAA coding sequence is (or comprises a sequence) at least 95%, at least 96%, at least 97%, at least 98%, at least 99%, at least 99.5%, or 100% identical to SEQ ID NO: 205 and encodes a GAA protein (or a GAA protein comprising a sequence) at least 99%, at least 99.5%, or 100% identical to SEQ ID NO: 173. In another example, the GAA coding sequence is (or comprises a sequence) at least 95%, at least 96%, at least 97%, at least 98%, at least 99%, at least 99.5%, or 100% identical to SEQ ID NO: 205 and encodes a GAA protein comprising the sequence set forth in SEQ ID NO: 173. In another example, the GAA coding sequence is (or comprises a sequence) at least 99%, at least 99.5%, or 100% identical to SEQ ID NO: 205. In another example, the GAA coding sequence is (or comprises a sequence) at least 99%, at least 99.5%, or 100% identical to SEQ ID NO: 205 and encodes a GAA protein (or a GAA protein comprising a sequence) at least 99%, at least 99.5%, or 100% identical to SEQ ID NO: 173. In another example, the GAA coding sequence is (or comprises a sequence) at least 99%, at least 99.5%, or 100% identical to SEQ ID NO: 205 and encodes a GAA protein comprising the sequence set forth in SEQ ID NO: 173. In another example, the GAA coding sequence comprises the sequence set forth in SEQ ID NO: 205. In another example, the GAA coding sequence consists essentially of the sequence set forth in SEQ ID NO: 205. In another example, the GAA coding sequence consists of the sequence set forth in SEQ ID NO: 205. The GAA coding sequence can be, for example, CpG-depleted (e.g., fully CpG-depleted) and/or codon optimized. For example, the GAA coding sequence can be CpG depleted (e.g., fully CpG-depleted) and codon optimized. Optionally, the GAA coding sequence encodes a GAA protein (or a GAA protein comprising a sequence) at least 90%, at least 91%, at least 92%, at least 93%, at least 94%, at least 95%, at least 96%, at least 97%, at least 98%, at least 99%, at least 99.5%, or 100% identical to SEQ ID NO: 173 (and, e.g., retaining the activity of native GAA). Optionally, the GAA coding sequence encodes a GAA protein (or a GAA protein comprising a sequence) at least 95%, at least 96%, at least 97%, at least 98%, at least 99%, at least 99.5%, or 100% identical to SEQ ID NO: 173 (and, e.g., retaining the activity of native GAA). Optionally, the GAA coding sequence in the above examples encodes a GAA protein (or a GAA protein comprising a sequence) at least 99%, at least 99.5%, or 100% identical to SEQ ID NO: 173 (and, e.g., retaining the activity of native GAA). Optionally, the GAA coding sequence in the above examples encodes a GAA protein comprising the sequence set forth in SEQ ID NO: 173. Optionally, the GAA coding sequence in the above examples encodes a GAA protein consisting essentially of the sequence set forth in SEQ ID NO: 173. Optionally, the GAA coding sequence in the above examples encodes a GAA protein consisting of the sequence set forth in SEQ ID NO: 173.

[0278] In one example, the GAA coding sequence is (or comprises a sequence) at least 90%, at least 91%, at least 92%, at least 93%, at least 94%, at least 95%, at least 96%, at least 97%, at least 98%, at least 99%, at least 99.5%, or 100% identical to SEQ ID NO: 206. In another example, the GAA coding sequence is (or comprises a sequence) at least 90%, at least 91%, at least 92%, at least 93%, at least 94%, at least 95%, at least 96%, at least 97%, at least 98%, at least 99%, at least 99.5%, or 100% identical to SEQ ID NO: 206 and encodes a GAA protein (or a GAA protein comprising a sequence) at least 99%, at least 99.5%, or 100% identical to SEQ ID NO: 173. In another example, the GAA coding sequence is (or comprises a sequence) at least 90%, at least 91%, at least 92%, at least 93%, at least 94%, at least 95%, at least 96%, at least 97%, at least 98%, at least 99%, at least 99.5%, or 100% identical to SEQ ID NO: 206 and encodes a GAA protein comprising the sequence set forth in SEQ ID NO: 173. In another example, the GAA coding sequence is (or comprises a sequence) at least 95%, at least 96%, at least 97%, at least 98%, at least 99%, at least 99.5%, or 100% identical to SEQ ID NO: 206. In another example, the GAA coding sequence is (or comprises a sequence) at least 95%, at least 96%, at least 97%, at least 98%, at least 99%, at least 99.5%, or 100% identical to SEQ ID NO: 206 and encodes a GAA protein (or a GAA protein comprising a sequence) at least 99%, at least 99.5%, or 100% identical to SEQ ID NO: 173. In another example, the GAA coding sequence is (or comprises a sequence) at least 95%, at least 96%, at least 97%, at least 98%, at least 99%, at least 99.5%, or 100% identical to SEQ ID NO: 206 and encodes a GAA protein comprising the sequence set forth in SEQ ID NO: 173. In another example, the GAA coding sequence is (or comprises a sequence) at least 99%, at least 99.5%, or 100% identical to SEQ ID NO: 206. In another example, the GAA coding sequence is (or comprises a sequence) at least 99%, at least 99.5%, or 100% identical to SEQ ID NO: 206 and encodes a GAA protein (or a GAA protein comprising a sequence) at least 99%, at least 99.5%, or 100% identical to SEQ ID NO: 173. In another example, the GAA coding sequence is (or comprises a sequence) at least 99%, at least 99.5%, or 100% identical to SEQ ID NO: 206 and encodes a GAA protein comprising the sequence set forth in SEQ ID NO: 173. In another example, the GAA coding sequence comprises the sequence set forth in SEQ ID NO: 206. In another example, the GAA coding sequence consists essentially of the sequence set forth in SEQ ID NO: 206. In another example, the GAA coding sequence consists of the sequence set forth in SEQ ID NO: 206. The GAA coding sequence can be, for example, CpG-depleted (e.g., fully CpG-depleted) and/or codon optimized. For example, the GAA coding sequence can be CpG depleted (e.g., fully CpG-depleted) and codon optimized. Optionally, the GAA coding sequence encodes a GAA protein (or a GAA protein comprising a sequence) at least 90%, at least 91%, at least 92%, at least 93%, at least 94%, at least 95%, at least 96%, at least 97%, at least 98%, at least 99%, at least 99.5%, or 100% identical to SEQ ID NO: 173 (and, e.g., retaining the activity of native GAA). Optionally, the GAA coding sequence encodes a GAA protein (or a GAA protein comprising a sequence) at least 95%, at least 96%, at least 97%, at least 98%, at least 99%, at least 99.5%, or 100% identical to SEQ ID NO: 173 (and, e.g., retaining the activity of native GAA). Optionally, the GAA coding sequence in the above examples encodes a GAA protein (or a GAA protein comprising a sequence) at least 99%, at least 99.5%, or 100% identical to SEQ ID NO: 173 (and, e.g., retaining the activity of native GAA). Optionally, the GAA coding sequence in the above examples encodes a GAA protein comprising the sequence set forth in SEQ ID NO: 173. Optionally, the GAA coding sequence in the above examples encodes a GAA protein consisting essentially of the sequence set forth in SEQ ID NO: 173. Optionally, the GAA coding sequence in the above examples encodes a GAA protein consisting of the sequence set forth in SEQ ID NO: 173.

[0279] In one example, the GAA coding sequence is (or comprises a sequence) at least 90%, at least 91%, at least 92%, at least 93%, at least 94%, at least 95%, at least 96%, at least 97%, at least 98%, at least 99%, at least 99.5%, or 100% identical to SEQ ID NO: 207. In another example, the GAA coding sequence is (or comprises a sequence) at least 90%, at least 91%, at least 92%, at least 93%, at least 94%, at least 95%, at least 96%, at least 97%, at least 98%, at least 99%, at least 99.5%, or 100% identical to SEQ ID NO: 207 and encodes a GAA protein (or a GAA protein comprising a sequence) at least 99%, at least 99.5%, or 100% identical to SEQ ID NO: 173. In another example, the GAA coding sequence is (or comprises a sequence) at least 90%, at least 91%, at least 92%, at least 93%, at least 94%, at least 95%, at least 96%, at least 97%, at least 98%, at least 99%, at least 99.5%, or 100% identical to SEQ ID NO: 207 and encodes a GAA protein comprising the sequence set forth in SEQ ID NO: 173. In another example, the GAA coding sequence is (or comprises a sequence) at least 95%, at least 96%, at least 97%, at least 98%, at least 99%, at least 99.5%, or 100% identical to SEQ ID NO: 207. In another example, the GAA coding sequence is (or comprises a sequence) at least 95%, at least 96%, at least 97%, at least 98%, at least 99%, at least 99.5%, or 100% identical to SEQ ID NO: 207 and encodes a GAA protein (or a GAA protein comprising a sequence) at least 99%, at least 99.5%, or 100% identical to SEQ ID NO: 173. In another example, the GAA coding sequence is (or comprises a sequence) at least 95%, at least 96%, at least 97%, at least 98%, at least 99%, at least 99.5%, or 100% identical to SEQ ID NO: 207 and encodes a GAA protein comprising the sequence set forth in SEQ ID NO: 173. In another example, the GAA coding sequence is (or comprises a sequence) at least 99%, at least 99.5%, or 100% identical to SEQ ID NO: 207. In another example, the GAA coding sequence is (or comprises a sequence) at least 99%, at least 99.5%, or 100% identical to SEQ ID NO: 207 and encodes a GAA protein (or a GAA protein comprising a sequence) at least 99%, at least 99.5%, or 100% identical to SEQ ID NO: 173. In another example, the GAA coding sequence is (or comprises a sequence) at least 99%, at least 99.5%, or 100% identical to SEQ ID NO: 207 and encodes a GAA protein comprising the sequence set forth in SEQ ID NO: 173. In another example, the GAA coding sequence comprises the sequence set forth in SEQ ID NO: 207. In another example, the GAA coding sequence consists essentially of the sequence set forth in SEQ ID NO: 207. In another example, the GAA coding sequence consists of the sequence set forth in SEQ ID NO: 207. The GAA coding sequence can be, for example, CpG-depleted (e.g., fully CpG-depleted) and/or codon optimized. For example, the GAA coding sequence can be CpG depleted (e.g., fully CpG-depleted) and codon optimized. Optionally, the GAA coding sequence encodes a GAA protein (or a GAA protein comprising a sequence) at least 90%, at least 91%, at least 92%, at least 93%, at least 94%, at least 95%, at least 96%, at least 97%, at least 98%, at least 99%, at least 99.5%, or 100% identical to SEQ ID NO: 173 (and, e.g., retaining the activity of native GAA). Optionally, the GAA coding sequence encodes a GAA protein (or a GAA protein comprising a sequence) at least 95%, at least 96%, at least 97%, at least 98%, at least 99%, at least 99.5%, or 100% identical to SEQ ID NO: 173 (and, e.g., retaining the activity of native GAA). Optionally, the GAA coding sequence in the above examples encodes a GAA protein (or a GAA protein comprising a sequence) at least 99%, at least 99.5%, or 100% identical to SEQ ID NO: 173 (and, e.g., retaining the activity of native GAA). Optionally, the GAA coding sequence in the above examples encodes a GAA protein comprising the sequence set forth in SEQ ID NO: 173. Optionally, the GAA coding sequence in the above examples encodes a GAA protein consisting essentially of the sequence set forth in SEQ ID NO: 173. Optionally, the GAA coding sequence in the above examples encodes a GAA protein consisting of the sequence set forth in SEQ ID NO: 173.

[0280] In one example, the GAA coding sequence is (or comprises a sequence) at least 90%, at least 91%, at least 92%, at least 93%, at least 94%, at least 95%, at least 96%, at least 97%, at least 98%, at least 99%, at least 99.5%, or 100% identical to SEQ ID NO: 208. In another example, the GAA coding sequence is (or comprises a sequence) at least 90%, at least 91%, at least 92%, at least 93%, at least 94%, at least 95%, at least 96%, at least 97%, at least 98%, at least 99%, at least 99.5%, or 100% identical to SEQ ID NO: 208 and encodes a GAA protein (or a GAA protein comprising a sequence) at least 99%, at least 99.5%, or 100% identical to SEQ ID NO: 173. In another example, the GAA coding sequence is (or comprises a sequence) at least 90%, at least 91%, at least 92%, at least 93%, at least 94%, at least 95%, at least 96%, at least 97%, at least 98%, at least 99%, at least 99.5%, or 100% identical to SEQ ID NO: 208 and encodes a GAA protein comprising the sequence set forth in SEQ ID NO: 173. In another example, the GAA coding sequence is (or comprises a sequence) at least 95%, at least 96%, at least 97%, at least 98%, at least 99%, at least 99.5%, or 100% identical to SEQ ID NO: 208. In another example, the GAA coding sequence is (or comprises a sequence) at least 95%, at least 96%, at least 97%, at least 98%, at least 99%, at least 99.5%, or 100% identical to SEQ ID NO: 208 and encodes a GAA protein (or a GAA protein comprising a sequence) at least 99%, at least 99.5%, or 100% identical to SEQ ID NO: 173. In another example, the GAA coding sequence is (or comprises a sequence) at least 95%, at least 96%, at least 97%, at least 98%, at least 99%, at least 99.5%, or 100% identical to SEQ ID NO: 208 and encodes a GAA protein comprising the sequence set forth in SEQ ID NO: 173. In another example, the GAA coding sequence is (or comprises a sequence) at least 99%, at least 99.5%, or 100% identical to SEQ ID NO: 208. In another example, the GAA coding sequence is (or comprises a sequence) at least 99%, at least 99.5%, or 100% identical to SEQ ID NO: 208 and encodes a GAA protein (or a GAA protein comprising a sequence) at least 99%, at least 99.5%, or 100% identical to SEQ ID NO: 173. In another example, the GAA coding sequence is (or comprises a sequence) at least 99%, at least 99.5%, or 100% identical to SEQ ID NO: 208 and encodes a GAA protein comprising the sequence set forth in SEQ ID NO: 173. In another example, the GAA coding sequence comprises the sequence set forth in SEQ ID NO: 208. In another example, the GAA coding sequence consists essentially of the sequence set forth in SEQ ID NO: 208. In another example, the GAA coding sequence consists of the sequence set forth in SEQ ID NO: 208. The GAA coding sequence can be, for example, CpG-depleted (e.g., fully CpG-depleted) and/or codon optimized. For example, the GAA coding sequence can be CpG depleted (e.g., fully CpG-depleted) and codon optimized. Optionally, the GAA coding sequence encodes a GAA protein (or a GAA protein comprising a sequence) at least 90%, at least 91%, at least 92%, at least 93%, at least 94%, at least 95%, at least 96%, at least 97%, at least 98%, at least 99%, at least 99.5%, or 100% identical to SEQ ID NO: 173 (and, e.g., retaining the activity of native GAA). Optionally, the GAA coding sequence encodes a GAA protein (or a GAA protein comprising a sequence) at least 95%, at least 96%, at least 97%, at least 98%, at least 99%, at least 99.5%, or 100% identical to SEQ ID NO: 173 (and, e.g., retaining the activity of native GAA). Optionally, the GAA coding sequence in the above examples encodes a GAA protein (or a GAA protein comprising a sequence) at least 99%, at least 99.5%, or 100% identical to SEQ ID NO: 173 (and, e.g., retaining the activity of native GAA). Optionally, the GAA coding sequence in the above examples encodes a GAA protein comprising the sequence set forth in SEQ ID NO: 173. Optionally, the GAA coding sequence in the above examples encodes a GAA protein consisting essentially of the sequence set forth in SEQ ID NO: 173. Optionally, the GAA coding sequence in the above examples encodes a GAA protein consisting of the sequence set forth in SEQ ID NO: 173.

[0281] In one example, the GAA coding sequence is (or comprises a sequence) at least 90%, at least 91%, at least 92%, at least 93%, at least 94%, at least 95%, at least 96%, at least 97%, at least 98%, at least 99%, at least 99.5%, or 100% identical to SEQ ID NO: 209. In another example, the GAA coding sequence is (or comprises a sequence) at least 90%, at least 91%, at least 92%, at least 93%, at least 94%, at least 95%, at least 96%, at least 97%, at least 98%, at least 99%, at least 99.5%, or 100% identical to SEQ ID NO: 209 and encodes a GAA protein (or a GAA protein comprising a sequence) at least 99%, at least 99.5%, or 100% identical to SEQ ID NO: 173. In another example, the GAA coding sequence is (or comprises a sequence) at least 90%, at least 91%, at least 92%, at least 93%, at least 94%, at least 95%, at least 96%, at least 97%, at least 98%, at least 99%, at least 99.5%, or 100% identical to SEQ ID NO: 209 and encodes a GAA protein comprising the sequence set forth in SEQ ID NO: 173. In another example, the GAA coding sequence is (or comprises a sequence) at least 95%, at least 96%, at least 97%, at least 98%, at least 99%, at least 99.5%, or 100% identical to SEQ ID NO: 209. In another example, the GAA coding sequence is (or comprises a sequence) at least 95%, at least 96%, at least 97%, at least 98%, at least 99%, at least 99.5%, or 100% identical to SEQ ID NO: 209 and encodes a GAA protein (or a GAA protein comprising a sequence) at least 99%, at least 99.5%, or 100% identical to SEQ ID NO: 173. In another example, the GAA coding sequence is (or comprises a sequence) at least 95%, at least 96%, at least 97%, at least 98%, at least 99%, at least 99.5%, or 100% identical to SEQ ID NO: 209 and encodes a GAA protein comprising the sequence set forth in SEQ ID NO: 173. In another example, the GAA coding sequence is (or comprises a sequence) at least 99%, at least 99.5%, or 100% identical to SEQ ID NO: 209. In another example, the GAA coding sequence is (or comprises a sequence) at least 99%, at least 99.5%, or 100% identical to SEQ ID NO: 209 and encodes a GAA protein (or a GAA protein comprising a sequence) at least 99%, at least 99.5%, or 100% identical to SEQ ID NO: 173. In another example, the GAA coding sequence is (or comprises a sequence) at least 99%, at least 99.5%, or 100% identical to SEQ ID NO: 209 and encodes a GAA protein comprising the sequence set forth in SEQ ID NO: 173. In another example, the GAA coding sequence comprises the sequence set forth in SEQ ID NO: 209. In another example, the GAA coding sequence consists essentially of the sequence set forth in SEQ ID NO: 209. In another example, the GAA coding sequence consists of the sequence set forth in SEQ ID NO: 209. The GAA coding sequence can be, for example, CpG-depleted (e.g., fully CpG-depleted) and/or codon optimized. For example, the GAA coding sequence can be CpG depleted (e.g., fully CpG-depleted) and codon optimized. Optionally, the GAA coding sequence encodes a GAA protein (or a GAA protein comprising a sequence) at least 90%, at least 91%, at least 92%, at least 93%, at least 94%, at least 95%, at least 96%, at least 97%, at least 98%, at least 99%, at least 99.5%, or 100% identical to SEQ ID NO: 173 (and, e.g., retaining the activity of native GAA). Optionally, the GAA coding sequence encodes a GAA protein (or a GAA protein comprising a sequence) at least 95%, at least 96%, at least 97%, at least 98%, at least 99%, at least 99.5%, or 100% identical to SEQ ID NO: 173 (and, e.g., retaining the activity of native GAA). Optionally, the GAA coding sequence in the above examples encodes a GAA protein (or a GAA protein comprising a sequence) at least 99%, at least 99.5%, or 100% identical to SEQ ID NO: 173 (and, e.g., retaining the activity of native GAA). Optionally, the GAA coding sequence in the above examples encodes a GAA protein comprising the sequence set forth in SEQ ID NO: 173. Optionally, the GAA coding sequence in the above examples encodes a GAA protein consisting essentially of the sequence set forth in SEQ ID NO: 173. Optionally, the GAA coding sequence in the above examples encodes a GAA protein consisting of the sequence set forth in SEQ ID NO: 173.

[0282] In one example, the GAA coding sequence is (or comprises a sequence) at least 90%, at least 91%, at least 92%, at least 93%, at least 94%, at least 95%, at least 96%, at least 97%, at least 98%, at least 99%, at least 99.5%, or 100% identical to SEQ ID NO: 210. In another example, the GAA coding sequence is (or comprises a sequence) at least 90%, at least 91%, at least 92%, at least 93%, at least 94%, at least 95%, at least 96%, at least 97%, at least 98%, at least 99%, at least 99.5%, or 100% identical to SEQ ID NO: 210 and encodes a GAA protein (or a GAA protein comprising a sequence) at least 99%, at least 99.5%, or 100% identical to SEQ ID NO: 173. In another example, the GAA coding sequence is (or comprises a sequence) at least 90%, at least 91%, at least 92%, at least 93%, at least 94%, at least 95%, at least 96%, at least 97%, at least 98%, at least 99%, at least 99.5%, or 100% identical to SEQ ID NO: 210 and encodes a GAA protein comprising the sequence set forth in SEQ ID NO: 173. In another example, the GAA coding sequence is (or comprises a sequence) at least 95%, at least 96%, at least 97%, at least 98%, at least 99%, at least 99.5%, or 100% identical to SEQ ID NO: 210. In another example, the GAA coding sequence is (or comprises a sequence) at least 95%, at least 96%, at least 97%, at least 98%, at least 99%, at least 99.5%, or 100% identical to SEQ ID NO: 210 and encodes a GAA protein (or a GAA protein comprising a sequence) at least 99%, at least 99.5%, or 100% identical to SEQ ID NO: 173. In another example, the GAA coding sequence is (or comprises a sequence) at least 95%, at least 96%, at least 97%, at least 98%, at least 99%, at least 99.5%, or 100% identical to SEQ ID NO: 210 and encodes a GAA protein comprising the sequence set forth in SEQ ID NO: 173. In another example, the GAA coding sequence is (or comprises a sequence) at least 99%, at least 99.5%, or 100% identical to SEQ ID NO: 210. In another example, the GAA coding sequence is (or comprises a sequence) at least 99%, at least 99.5%, or 100% identical to SEQ ID NO: 210 and encodes a GAA protein (or a GAA protein comprising a sequence) at least 99%, at least 99.5%, or 100% identical to SEQ ID NO: 173. In another example, the GAA coding sequence is (or comprises a sequence) at least 99%, at least 99.5%, or 100% identical to SEQ ID NO: 210 and encodes a GAA protein comprising the sequence set forth in SEQ ID NO: 173. In another example, the GAA coding sequence comprises the sequence set forth in SEQ ID NO: 210. In another example, the GAA coding sequence consists essentially of the sequence set forth in SEQ ID NO: 210. In another example, the GAA coding sequence consists of the sequence set forth in SEQ ID NO: 210. The GAA coding sequence can be, for example, CpG-depleted (e.g., fully CpG-depleted) and/or codon optimized. For example, the GAA coding sequence can be CpG depleted (e.g., fully CpG-depleted) and codon optimized. Optionally, the GAA coding sequence encodes a GAA protein (or a GAA protein comprising a sequence) at least 90%, at least 91%, at least 92%, at least 93%, at least 94%, at least 95%, at least 96%, at least 97%, at least 98%, at least 99%, at least 99.5%, or 100% identical to SEQ ID NO: 173 (and, e.g., retaining the activity of native GAA). Optionally, the GAA coding sequence encodes a GAA protein (or a GAA protein comprising a sequence) at least 95%, at least 96%, at least 97%, at least 98%, at least 99%, at least 99.5%, or 100% identical to SEQ ID NO: 173 (and, e.g., retaining the activity of native GAA). Optionally, the GAA coding sequence in the above examples encodes a GAA protein (or a GAA protein comprising a sequence) at least 99%, at least 99.5%, or 100% identical to SEQ ID NO: 173 (and, e.g., retaining the activity of native GAA). Optionally, the GAA coding sequence in the above examples encodes a GAA protein comprising the sequence set forth in SEQ ID NO: 173. Optionally, the GAA coding sequence in the above examples encodes a GAA protein consisting essentially of the sequence set forth in SEQ ID NO: 173. Optionally, the GAA coding sequence in the above examples encodes a GAA protein consisting of the sequence set forth in SEQ ID NO: 173.

[0283] In one example, the GAA coding sequence is (or comprises a sequence) at least 90%, at least 91%, at least 92%, at least 93%, at least 94%, at least 95%, at least 96%, at least 97%, at least 98%, at least 99%, at least 99.5%, or 100% identical to SEQ ID NO: 211. In another example, the GAA coding sequence is (or comprises a sequence) at least 90%, at least 91%, at least 92%, at least 93%, at least 94%, at least 95%, at least 96%, at least 97%, at least 98%, at least 99%, at least 99.5%, or 100% identical to SEQ ID NO: 211 and encodes a GAA protein (or a GAA protein comprising a sequence) at least 99%, at least 99.5%, or 100% identical to SEQ ID NO: 173. In another example, the GAA coding sequence is (or comprises a sequence) at least 90%, at least 91%, at least 92%, at least 93%, at least 94%, at least 95%, at least 96%, at least 97%, at least 98%, at least 99%, at least 99.5%, or 100% identical to SEQ ID NO: 211 and encodes a GAA protein comprising the sequence set forth in SEQ ID NO: 173. In another example, the GAA coding sequence is (or comprises a sequence) at least 95%, at least 96%, at least 97%, at least 98%, at least 99%, at least 99.5%, or 100% identical to SEQ ID NO: 211. In another example, the GAA coding sequence is (or comprises a sequence) at least 95%, at least 96%, at least 97%, at least 98%, at least 99%, at least 99.5%, or 100% identical to SEQ ID NO: 211 and encodes a GAA protein (or a GAA protein comprising a sequence) at least 99%, at least 99.5%, or 100% identical to SEQ ID NO: 173. In another example, the GAA coding sequence is (or comprises a sequence) at least 95%, at least 96%, at least 97%, at least 98%, at least 99%, at least 99.5%, or 100% identical to SEQ ID NO: 211 and encodes a GAA protein comprising the sequence set forth in SEQ ID NO: 173. In another example, the GAA coding sequence is (or comprises a sequence) at least 99%, at least 99.5%, or 100% identical to SEQ ID NO: 211. In another example, the GAA coding sequence is (or comprises a sequence) at least 99%, at least 99.5%, or 100% identical to SEQ ID NO: 211 and encodes a GAA protein (or a GAA protein comprising a sequence) at least 99%, at least 99.5%, or 100% identical to SEQ ID NO: 173. In another example, the GAA coding sequence is (or comprises a sequence) at least 99%, at least 99.5%, or 100% identical to SEQ ID NO: 211 and encodes a GAA protein comprising the sequence set forth in SEQ ID NO: 173. In another example, the GAA coding sequence comprises the sequence set forth in SEQ ID NO: 211. In another example, the GAA coding sequence consists essentially of the sequence set forth in SEQ ID NO: 211. In another example, the GAA coding sequence consists of the sequence set forth in SEQ ID NO: 211. The GAA coding sequence can be, for example, CpG-depleted (e.g., fully CpG-depleted) and/or codon optimized. For example, the GAA coding sequence can be CpG depleted (e.g., fully CpG-depleted) and codon optimized. Optionally, the GAA coding sequence encodes a GAA protein (or a GAA protein comprising a sequence) at least 90%, at least 91%, at least 92%, at least 93%, at least 94%, at least 95%, at least 96%, at least 97%, at least 98%, at least 99%, at least 99.5%, or 100% identical to SEQ ID NO: 173 (and, e.g., retaining the activity of native GAA). Optionally, the GAA coding sequence encodes a GAA protein (or a GAA protein comprising a sequence) at least 95%, at least 96%, at least 97%, at least 98%, at least 99%, at least 99.5%, or 100% identical to SEQ ID NO: 173 (and, e.g., retaining the activity of native GAA). Optionally, the GAA coding sequence in the above examples encodes a GAA protein (or a GAA protein comprising a sequence) at least 99%, at least 99.5%, or 100% identical to SEQ ID NO: 173 (and, e.g., retaining the activity of native GAA). Optionally, the GAA coding sequence in the above examples encodes a GAA protein comprising the sequence set forth in SEQ ID NO: 173. Optionally, the GAA coding sequence in the above examples encodes a GAA protein consisting essentially of the sequence set forth in SEQ ID NO: 173. Optionally, the GAA coding sequence in the above examples encodes a GAA protein consisting of the sequence set forth in SEQ ID NO: 173.

[0284] In one example, the GAA coding sequence is (or comprises a sequence) at least 90%, at least 91%, at least 92%, at least 93%, at least 94%, at least 95%, at least 96%, at least 97%, at least 98%, at least 99%, at least 99.5%, or 100% identical to SEQ ID NO: 212. In another example, the GAA coding sequence is (or comprises a sequence) at least 90%, at least 91%, at least 92%, at least 93%, at least 94%, at least 95%, at least 96%, at least 97%, at least 98%, at least 99%, at least 99.5%, or 100% identical to SEQ ID NO: 212 and encodes a GAA protein (or a GAA protein comprising a sequence) at least 99%, at least 99.5%, or 100% identical to SEQ ID NO: 173. In another example, the GAA coding sequence is (or comprises a sequence) at least 90%, at least 91%, at least 92%, at least 93%, at least 94%, at least 95%, at least 96%, at least 97%, at least 98%, at least 99%, at least 99.5%, or 100% identical to SEQ ID NO: 212 and encodes a GAA protein comprising the sequence set forth in SEQ ID NO: 173. In another example, the GAA coding sequence is (or comprises a sequence) at least 95%, at least 96%, at least 97%, at least 98%, at least 99%, at least 99.5%, or 100% identical to SEQ ID NO: 212. In another example, the GAA coding sequence is (or comprises a sequence) at least 95%, at least 96%, at least 97%, at least 98%, at least 99%, at least 99.5%, or 100% identical to SEQ ID NO: 212 and encodes a GAA protein (or a GAA protein comprising a sequence) at least 99%, at least 99.5%, or 100% identical to SEQ ID NO: 173. In another example, the GAA coding sequence is (or comprises a sequence) at least 95%, at least 96%, at least 97%, at least 98%, at least 99%, at least 99.5%, or 100% identical to SEQ ID NO: 212 and encodes a GAA protein comprising the sequence set forth in SEQ ID NO: 173. In another example, the GAA coding sequence is (or comprises a sequence) at least 99%, at least 99.5%, or 100% identical to SEQ ID NO: 212. In another example, the GAA coding sequence is (or comprises a sequence) at least 99%, at least 99.5%, or 100% identical to SEQ ID NO: 212 and encodes a GAA protein (or a GAA protein comprising a sequence) at least 99%, at least 99.5%, or 100% identical to SEQ ID NO: 173. In another example, the GAA coding sequence is (or comprises a sequence) at least 99%, at least 99.5%, or 100% identical to SEQ ID NO: 212 and encodes a GAA protein comprising the sequence set forth in SEQ ID NO: 173. In another example, the GAA coding sequence comprises the sequence set forth in SEQ ID NO: 212. In another example, the GAA coding sequence consists essentially of the sequence set forth in SEQ ID NO: 212. In another example, the GAA coding sequence consists of the sequence set forth in SEQ ID NO: 212. The GAA coding sequence can be, for example, CpG-depleted (e.g., fully CpG-depleted) and/or codon optimized. For example, the GAA coding sequence can be CpG depleted (e.g., fully CpG-depleted) and codon optimized. Optionally, the GAA coding sequence encodes a GAA protein (or a GAA protein comprising a sequence) at least 90%, at least 91%, at least 92%, at least 93%, at least 94%, at least 95%, at least 96%, at least 97%, at least 98%, at least 99%, at least 99.5%, or 100% identical to SEQ ID NO: 173 (and, e.g., retaining the activity of native GAA). Optionally, the GAA coding sequence encodes a GAA protein (or a GAA protein comprising a sequence) at least 95%, at least 96%, at least 97%, at least 98%, at least 99%, at least 99.5%, or 100% identical to SEQ ID NO: 173 (and, e.g., retaining the activity of native GAA). Optionally, the GAA coding sequence in the above examples encodes a GAA protein (or a GAA protein comprising a sequence) at least 99%, at least 99.5%, or 100% identical to SEQ ID NO: 173 (and, e.g., retaining the activity of native GAA). Optionally, the GAA coding sequence in the above examples encodes a GAA protein comprising the sequence set forth in SEQ ID NO: 173. Optionally, the GAA coding sequence in the above examples encodes a GAA protein consisting essentially of the sequence set forth in SEQ ID NO: 173. Optionally, the GAA coding sequence in the above examples encodes a GAA protein consisting of the sequence set forth in SEQ ID NO: 173.

[0285] When specific GAA or multidomain therapeutic protein nucleic acid constructs sequences are disclosed herein, they are meant to encompass the sequence disclosed or the reverse complement of the sequence. For example, if a GAA or multidomain therapeutic protein nucleic acid construct disclosed herein consists of the hypothetical sequence 5′-CTGGACCGA-3′, it is also meant to encompass the reverse complement of that sequence (5′-TCGGTCCAG-3′). Likewise, when construct elements are disclosed herein in a specific 5′ to 3′ order, they are also meant to encompass the reverse complement of the order of those elements. One reason for this is that, in many embodiments disclosed herein, the GAA or multidomain therapeutic protein nucleic acid constructs are part of a single-stranded recombinant AAV vector. Single-stranded AAV genomes are packaged as either sense (plus-stranded) or anti-sense (minus-stranded genomes), and single-stranded AAV genomes of + and - polarity are packaged with equal frequency into mature rAAV virions. See, e.g., LING et al. (2015) J. Mol. Genet. Med. 9(3):175, Zhou et al. (2008) Mol. Ther. 16(3):494-499, and Samulski et al. (1987) J. Virol. 61:3096-3101, each of which is herein incorporated by reference in its entirety for all purposes.

### (B) CD63-Binding Delivery Domain

[0286] The multidomain therapeutic proteins disclosed herein can comprise a CD63-binding delivery domain fused to a GAA. The CD63-binding domain provides binding to the internalization factor CD63 (UniProt Ref. P08962-1). CD63 (also known as CD63 antigen, granulophysin, lysosomal-associated membrane protein 3, LAMP-3, lysosome integral membrane protein 1, Limp1, melanoma-associated antigen ME491, OMA81H, ocular melanoma-associated antigen, tetraspanin-30, or Tspan-30) is a member of the tetraspanin superfamily of cell surface proteins that span the cell membrane four times. It is encoded by the CD63 gene (also known as MLA1 or TSPAN30). CD63 is expressed in virtually all tissues and is thought to be involved in forming and stabilizing signaling complexes. CD63 localizes to the cell membrane, lysosomal membrane, and late endosomal membrane. CD63 is known to associate with integrins and may be involved in epithelial-mesenchymal transitioning.

[0287] In some multidomain therapeutic proteins, the CD63-binding delivery domain is an antibody, an antibody fragment or other antigen-binding protein. In some multidomain therapeutic proteins, the CD63-binding delivery domain is an antigen-binding protein. Examples of antigen-binding proteins include, for example, a receptor-fusion molecule, a trap molecule, a receptor-Fc fusion molecule, an antibody, an Fab fragment, an F(ab′)2 fragment, an Fd fragment, an Fv fragment, a single-chain Fv (scFv) molecule, a dAb fragment, an isolated complementarity determining region (CDR), a CDR3 peptide, a constrained FR3-CDR3-FR4 peptide, a domain-specific antibody, a single domain antibody, a domain-deleted antibody, a chimeric antibody, a CDR-grafted antibody, a diabody, a triabody, a tetrabody, a minibody, a nanobody, a monovalent nanobody, a bivalent nanobody, a small modular immunopharmaceutical (SMIP), a camelid antibody (VHH heavy chain homodimeric antibody), and a shark variable IgNAR domain. Examples of CD63-binding delivery domains can be found in WO 2013/138400, WO 2017/007796, WO 2017/190079, WO 2017/100467, WO 2018/226861, WO 2019/157224, and WO 2019/222663, each of which is herein incorporated by reference in its entirety for all purposes.

[0288] In a particular multidomain therapeutic protein, the CD63-binding delivery domain is an anti-CD63 scFv. In a specific example, the anti-CD63 scFv can comprise SEQ ID NO: 183 or can be at least 90%, at least 91%, at least 92%, at least 93%, at least 94%, at least 95%, at least 96%, at least 97%, at least 98%, at least 99%, or at least 99.5% identical to SEQ ID NO: 183. In another specific example, the anti-CD63 scFv can consist essentially of SEQ ID NO: 183. In another specific example, the anti-CD63 scFv can consist of SEQ ID NO: 183.

[0289] The CD63-binding delivery domain coding sequences in the constructs disclosed herein may include one or more modifications such as codon optimization (e.g., to human codons), depletion of CpG dinucleotides, mutation of cryptic splice sites, addition of one or more glycosylation sites, or any combination thereof. CpG dinucleotides in a construct can limit the therapeutic utility of the construct. First, unmethylated CpG dinucleotides can interact with host toll-like receptor-9 (TLR-9) to stimulate innate, proinflammatory immune responses. Second, once the CpG dinucleotides become methylated, they can result in the suppression of transgene expression coordinated by methyl-CpG binding proteins. Cryptic splice sites are sequences in a pre-messenger RNA that are not normally used as splice sites, but that can be activated, for example, by mutations that either inactivate canonical splice sites or create splice sites where one did not exist before. Accurate splice site selection is critical for successful gene expression, and removal of cryptic splice sites can favor use of the normal or intended splice site.

[0290] In one example, a CD63-binding delivery domain coding sequence in a construct disclosed herein has one or more cryptic splice sites mutated or removed. In another example, a CD63-binding delivery domain coding sequence in a construct disclosed herein has all identified cryptic splice sites mutated or removed. In another example, a CD63-binding delivery domain coding sequence in a construct disclosed herein has one or more CpG dinucleotides removed (i.e., is CpG depleted). In another example, a CD63-binding delivery domain coding sequence in a construct disclosed herein has all CpG dinucleotides removed (i.e., is fully CpG depleted). In another example, a CD63-binding delivery domain coding sequence in a construct disclosed herein is codon optimized (e.g., codon optimized for expression in a human or mammal). In a specific example, a CD63-binding delivery domain coding sequence in a construct disclosed herein has one or more CpG dinucleotides removed (i.e., is CpG depleted) and has one or more cryptic splice sites mutated or removed. In another specific example, a CD63-binding delivery domain coding sequence in a construct disclosed herein has all CpG dinucleotides removed and has one or more or all identified cryptic splice sites mutated or removed. In another specific example, a CD63-binding delivery domain coding sequence in a construct disclosed herein has one or more CpG dinucleotides removed (i.e., is CpG depleted) and is codon optimized (e.g., codon optimized for expression in a human or mammal). In another specific example, a CD63-binding delivery domain coding sequence in a construct disclosed herein has all CpG dinucleotides removed (i.e., is fully CpG depleted) and is codon optimized (e.g., codon optimized for expression in a human or mammal).

[0291] Various anti-CD63 scFv coding sequences are provided. In one example, the anti-CD63 scFv coding sequence is (or comprises a sequence) at least 90%, at least 91%, at least 92%, at least 93%, at least 94%, at least 95%, at least 96%, at least 97%, at least 98%, at least 99%, at least 99.5%, or 100% identical to any one of SEQ ID NOS: 184-192. In another example, the anti-CD63 scFv coding sequence is (or comprises a sequence) at least 95%, at least 96%, at least 97%, at least 98%, at least 99%, at least 99.5%, or 100% identical to any one of SEQ ID NOS: 184-192. In another example, the anti-CD63 scFv coding sequence is (or comprises a sequence) at least 99%, at least 99.5%, or 100% identical to any one of SEQ ID NOS: 184-192. In another example, the anti-CD63 scFv coding sequence comprises the sequence set forth in any one of SEQ ID NOS: 184-192. In another example, the anti-CD63 scFv coding sequence consists essentially of the sequence set forth in any one of SEQ ID NOS: 184-192. In another example, the anti-CD63 scFv coding sequence consists of the sequence set forth in any one of SEQ ID NOS: 184-192. In one example, the anti-CD63 scFv coding sequence is (or comprises a sequence) at least 90%, at least 91%, at least 92%, at least 93%, at least 94%, at least 95%, at least 96%, at least 97%, at least 98%, at least 99%, at least 99.5%, or 100% identical to SEQ ID NO: 186. In another example, the anti-CD63 scFv coding sequence is (or comprises a sequence) at least 95%, at least 96%, at least 97%, at least 98%, at least 99%, at least 99.5%, or 100% identical to SEQ ID NO: 186. In another example, the anti-CD63 scFv coding sequence is (or comprises a sequence) at least 99%, at least 99.5%, or 100% identical to SEQ ID NO: 186. In another example, the anti-CD63 scFv coding sequence comprises the sequence set forth in SEQ ID NO: 186. In another example, the anti-CD63 scFv coding sequence consists essentially of the sequence set forth in SEQ ID NO: 186. In another example, the anti-CD63 scFv coding sequence consists of the sequence set forth in SEQ ID NO: 186. Optionally, the anti-CD63 scFv coding sequence encodes an anti-CD63 scFv protein (or an anti-CD63 scFv protein comprising a sequence) at least 90%, at least 91%, at least 92%, at least 93%, at least 94%, at least 95%, at least 96%, at least 97%, at least 98%, at least 99%, at least 99.5%, or 100% identical to SEQ ID NO: 183 (and, e.g., retaining CD63-binding activity). Optionally, the anti-CD63 scFv coding sequence encodes an anti-CD63 scFv protein (or an anti-CD63 scFv protein comprising a sequence) at least 95%, at least 96%, at least 97%, at least 98%, at least 99%, at least 99.5%, or 100% identical to SEQ ID NO: 183 (and, e.g., retaining CD63-binding activity). Optionally, the anti-CD63 scFv coding sequence in the above examples encodes an anti-CD63 scFv protein (or an anti-CD63 scFv protein comprising a sequence) at least 99%, at least 99.5%, or 100% identical to SEQ ID NO: 183 (and, e.g., retaining CD63-binding activity). Optionally, the anti-CD63 scFv coding sequence in the above examples encodes an anti-CD63 scFv protein comprising the sequence set forth in SEQ ID NO: 183. Optionally, the anti-CD63 scFv coding sequence in the above examples encodes an anti-CD63 scFv protein consisting essentially of the sequence set forth in SEQ ID NO: 183. Optionally, the anti-CD63 scFv coding sequence in the above examples encodes an anti-CD63 scFv protein consisting of the sequence set forth in SEQ ID NO: 183.

[0292] Various codon optimized anti-CD63 scFv coding sequences are provided. The anti-CD63 scFv coding sequence can be, for example, CpG-depleted (e.g., fully CpG depleted) and/or codon optimized (e.g., CpG depleted (e.g., fully CpG-depleted) and codon optimized). In one example, the anti-CD63 scFv coding sequence is (or comprises a sequence) at least 90%, at least 91%, at least 92%, at least 93%, at least 94%, at least 95%, at least 96%, at least 97%, at least 98%, at least 99%, at least 99.5%, or 100% identical to any one of SEQ ID NOS: 185-192. In another example, the anti-CD63 scFv coding sequence is (or comprises a sequence) at least 95%, at least 96%, at least 97%, at least 98%, at least 99%, at least 99.5%, or 100% identical to any one of SEQ ID NOS: 185-192. In another example, the anti-CD63 scFv coding sequence is (or comprises a sequence) at least 99%, at least 99.5%, or 100% identical to any one of SEQ ID NOS: 185-192. In another example, the anti-CD63 scFv coding sequence comprises the sequence set forth in any one of SEQ ID NOS: 185-192. In another example, the anti-CD63 scFv coding sequence consists essentially of the sequence set forth in any one of SEQ ID NOS: 185-192. In another example, the anti-CD63 scFv coding sequence consists of the sequence set forth in any one of SEQ ID NOS: 185-192. Optionally, the anti-CD63 scFv coding sequence encodes an anti-CD63 scFv protein (or an anti-CD63 scFv protein comprising a sequence) at least 90%, at least 91%, at least 92%, at least 93%, at least 94%, at least 95%, at least 96%, at least 97%, at least 98%, at least 99%, at least 99.5%, or 100% identical to SEQ ID NO: 183 (and, e.g., retaining CD63-binding activity). Optionally, the anti-CD63 scFv coding sequence encodes an anti-CD63 scFv protein (or an anti-CD63 scFv protein comprising a sequence) at least 95%, at least 96%, at least 97%, at least 98%, at least 99%, at least 99.5%, or 100% identical to SEQ ID NO: 183 (and, e.g., retaining CD63-binding activity). Optionally, the anti-CD63 scFv coding sequence in the above examples encodes an anti-CD63 scFv protein (or an anti-CD63 scFv protein comprising a sequence) at least 99%, at least 99.5%, or 100% identical to SEQ ID NO: 183 (and, e.g., retaining CD63-binding activity). Optionally, the anti-CD63 scFv coding sequence in the above examples encodes an anti-CD63 scFv protein comprising the sequence set forth in SEQ ID NO: 183. Optionally, the anti-CD63 scFv coding sequence in the above examples encodes an anti-CD63 scFv protein consisting essentially of the sequence set forth in SEQ ID NO: 183. Optionally, the anti-CD63 scFv coding sequence in the above examples encodes an anti-CD63 scFv protein consisting of the sequence set forth in SEQ ID NO: 183.

[0293] In one example, the anti-CD63 scFv coding sequence is (or comprises a sequence) at least 90%, at least 91%, at least 92%, at least 93%, at least 94%, at least 95%, at least 96%, at least 97%, at least 98%, at least 99%, at least 99.5%, or 100% identical to SEQ ID NO: 186. In another example, the anti-CD63 scFv coding sequence is (or comprises a sequence) at least 90%, at least 91%, at least 92%, at least 93%, at least 94%, at least 95%, at least 96%, at least 97%, at least 98%, at least 99%, at least 99.5%, or 100% identical to SEQ ID NO: 186 and encodes an anti-CD63 scFv protein (or an anti-CD63 scFv protein comprising a sequence) at least 99%, at least 99.5%, or 100% identical to SEQ ID NO: 183. In another example, the anti-CD63 scFv coding sequence is (or comprises a sequence) at least 90%, at least 91%, at least 92%, at least 93%, at least 94%, at least 95%, at least 96%, at least 97%, at least 98%, at least 99%, at least 99.5%, or 100% identical to SEQ ID NO: 186 and encodes an anti-CD63 scFv protein comprising the sequence set forth in SEQ ID NO: 183. In another example, the anti-CD63 scFv coding sequence is (or comprises a sequence) at least 95%, at least 96%, at least 97%, at least 98%, at least 99%, at least 99.5%, or 100% identical to SEQ ID NO: 186. In another example, the anti-CD63 scFv coding sequence is (or comprises a sequence) at least 95%, at least 96%, at least 97%, at least 98%, at least 99%, at least 99.5%, or 100% identical to SEQ ID NO: 186 and encodes an anti-CD63 scFv protein (or an anti-CD63 scFv protein comprising a sequence) at least 99%, at least 99.5%, or 100% identical to SEQ ID NO: 183. In another example, the anti-CD63 scFv coding sequence is (or comprises a sequence) at least 95%, at least 96%, at least 97%, at least 98%, at least 99%, at least 99.5%, or 100% identical to SEQ ID NO: 186 and encodes an anti-CD63 scFv protein comprising the sequence set forth in SEQ ID NO: 183. In another example, the anti-CD63 scFv coding sequence is (or comprises a sequence) at least 99%, at least 99.5%, or 100% identical to SEQ ID NO: 186. In another example, the anti-CD63 scFv coding sequence is (or comprises a sequence) at least 99%, at least 99.5%, or 100% identical to SEQ ID NO: 186 and encodes an anti-CD63 scFv protein (or an anti-CD63 scFv protein comprising a sequence) at least 99%, at least 99.5%, or 100% identical to SEQ ID NO: 183. In another example, the anti-CD63 scFv coding sequence is (or comprises a sequence) at least 99%, at least 99.5%, or 100% identical to SEQ ID NO: 186 and encodes an anti-CD63 scFv protein comprising the sequence set forth in SEQ ID NO: 183. In another example, the anti-CD63 scFv coding sequence comprises the sequence set forth in SEQ ID NO: 186. In another example, the anti-CD63 scFv coding sequence consists essentially of the sequence set forth in SEQ ID NO: 186. In another example, the anti-CD63 scFv coding sequence consists of the sequence set forth in SEQ ID NO: 186. The anti-CD63 scFv coding sequence can be, for example, CpG-depleted (e.g., fully CpG-depleted) and/or codon optimized. For example, the anti-CD63 scFv coding sequence can be CpG depleted (e.g., fully CpG-depleted) and codon optimized. Optionally, the anti-CD63 scFv coding sequence encodes an anti-CD63 scFv protein (or an anti-CD63 scFv protein comprising a sequence) at least 90%, at least 91%, at least 92%, at least 93%, at least 94%, at least 95%, at least 96%, at least 97%, at least 98%, at least 99%, at least 99.5%, or 100% identical to SEQ ID NO: 183 (and, e.g., retaining CD63-binding activity). Optionally, the anti-CD63 scFv coding sequence encodes an anti-CD63 scFv protein (or an anti-CD63 scFv protein comprising a sequence) at least 95%, at least 96%, at least 97%, at least 98%, at least 99%, at least 99.5%, or 100% identical to SEQ ID NO: 183 (and, e.g., retaining CD63-binding activity). Optionally, the anti-CD63 scFv coding sequence in the above examples encodes an anti-CD63 scFv protein (or an anti-CD63 scFv protein comprising a sequence) at least 99%, at least 99.5%, or 100% identical to SEQ ID NO: 183 (and, e.g., retaining CD63-binding activity). Optionally, the anti-CD63 scFv coding sequence in the above examples encodes an anti-CD63 scFv protein comprising the sequence set forth in SEQ ID NO: 183. Optionally, the anti-CD63 scFv coding sequence in the above examples encodes an anti-CD63 scFv protein consisting essentially of the sequence set forth in SEQ ID NO: 183. Optionally, the anti-CD63 scFv coding sequence in the above examples encodes an anti-CD63 scFv protein consisting of the sequence set forth in SEQ ID NO: 183.

[0294] In one example, the anti-CD63 scFv coding sequence is (or comprises a sequence) at least 90%, at least 91%, at least 92%, at least 93%, at least 94%, at least 95%, at least 96%, at least 97%, at least 98%, at least 99%, at least 99.5%, or 100% identical to SEQ ID NO: 184. In another example, the anti-CD63 scFv coding sequence is (or comprises a sequence) at least 90%, at least 91%, at least 92%, at least 93%, at least 94%, at least 95%, at least 96%, at least 97%, at least 98%, at least 99%, at least 99.5%, or 100% identical to SEQ ID NO: 184 and encodes an anti-CD63 scFv protein (or an anti-CD63 scFv protein comprising a sequence) at least 99%, at least 99.5%, or 100% identical to SEQ ID NO: 183. In another example, the anti-CD63 scFv coding sequence is (or comprises a sequence) at least 90%, at least 91%, at least 92%, at least 93%, at least 94%, at least 95%, at least 96%, at least 97%, at least 98%, at least 99%, at least 99.5%, or 100% identical to SEQ ID NO: 184 and encodes an anti-CD63 scFv protein comprising the sequence set forth in SEQ ID NO: 183. In another example, the anti-CD63 scFv coding sequence is (or comprises a sequence) at least 95%, at least 96%, at least 97%, at least 98%, at least 99%, at least 99.5%, or 100% identical to SEQ ID NO: 184. In another example, the anti-CD63 scFv coding sequence is (or comprises a sequence) at least 95%, at least 96%, at least 97%, at least 98%, at least 99%, at least 99.5%, or 100% identical to SEQ ID NO: 184 and encodes an anti-CD63 scFv protein (or an anti-CD63 scFv protein comprising a sequence) at least 99%, at least 99.5%, or 100% identical to SEQ ID NO: 183. In another example, the anti-CD63 scFv coding sequence is (or comprises a sequence) at least 95%, at least 96%, at least 97%, at least 98%, at least 99%, at least 99.5%, or 100% identical to SEQ ID NO: 184 and encodes an anti-CD63 scFv protein comprising the sequence set forth in SEQ ID NO: 183. In another example, the anti-CD63 scFv coding sequence is (or comprises a sequence) at least 99%, at least 99.5%, or 100% identical to SEQ ID NO: 184. In another example, the anti-CD63 scFv coding sequence is (or comprises a sequence) at least 99%, at least 99.5%, or 100% identical to SEQ ID NO: 184 and encodes an anti-CD63 scFv protein (or an anti-CD63 scFv protein comprising a sequence) at least 99%, at least 99.5%, or 100% identical to SEQ ID NO: 183. In another example, the anti-CD63 scFv coding sequence is (or comprises a sequence) at least 99%, at least 99.5%, or 100% identical to SEQ ID NO: 184 and encodes an anti-CD63 scFv protein comprising the sequence set forth in SEQ ID NO: 183. In another example, the anti-CD63 scFv coding sequence comprises the sequence set forth in SEQ ID NO: 184. In another example, the anti-CD63 scFv coding sequence consists essentially of the sequence set forth in SEQ ID NO: 184. In another example, the anti-CD63 scFv coding sequence consists of the sequence set forth in SEQ ID NO: 184. The anti-CD63 scFv coding sequence can be, for example, CpG-depleted (e.g., fully CpG-depleted) and/or codon optimized. For example, the anti-CD63 scFv coding sequence can be CpG depleted (e.g., fully CpG-depleted) and codon optimized. Optionally, the anti-CD63 scFv coding sequence encodes an anti-CD63 scFv protein (or an anti-CD63 scFv protein comprising a sequence) at least 90%, at least 91%, at least 92%, at least 93%, at least 94%, at least 95%, at least 96%, at least 97%, at least 98%, at least 99%, at least 99.5%, or 100% identical to SEQ ID NO: 183 (and, e.g., retaining CD63-binding activity). Optionally, the anti-CD63 scFv coding sequence encodes an anti-CD63 scFv protein (or an anti-CD63 scFv protein comprising a sequence) at least 95%, at least 96%, at least 97%, at least 98%, at least 99%, at least 99.5%, or 100% identical to SEQ ID NO: 183 (and, e.g., retaining CD63-binding activity). Optionally, the anti-CD63 scFv coding sequence in the above examples encodes an anti-CD63 scFv protein (or an anti-CD63 scFv protein comprising a sequence) at least 99%, at least 99.5%, or 100% identical to SEQ ID NO: 183 (and, e.g., retaining CD63-binding activity). Optionally, the anti-CD63 scFv coding sequence in the above examples encodes an anti-CD63 scFv protein comprising the sequence set forth in SEQ ID NO: 183. Optionally, the anti-CD63 scFv coding sequence in the above examples encodes an anti-CD63 scFv protein consisting essentially of the sequence set forth in SEQ ID NO: 183. Optionally, the anti-CD63 scFv coding sequence in the above examples encodes an anti-CD63 scFv protein consisting of the sequence set forth in SEQ ID NO: 183.

[0295] In one example, the anti-CD63 scFv coding sequence is (or comprises a sequence) at least 90%, at least 91%, at least 92%, at least 93%, at least 94%, at least 95%, at least 96%, at least 97%, at least 98%, at least 99%, at least 99.5%, or 100% identical to SEQ ID NO: 191. In another example, the anti-CD63 scFv coding sequence is (or comprises a sequence) at least 90%, at least 91%, at least 92%, at least 93%, at least 94%, at least 95%, at least 96%, at least 97%, at least 98%, at least 99%, at least 99.5%, or 100% identical to SEQ ID NO: 191 and encodes an anti-CD63 scFv protein (or an anti-CD63 scFv protein comprising a sequence) at least 99%, at least 99.5%, or 100% identical to SEQ ID NO: 183. In another example, the anti-CD63 scFv coding sequence is (or comprises a sequence) at least 90%, at least 91%, at least 92%, at least 93%, at least 94%, at least 95%, at least 96%, at least 97%, at least 98%, at least 99%, at least 99.5%, or 100% identical to SEQ ID NO: 191 and encodes an anti-CD63 scFv protein comprising the sequence set forth in SEQ ID NO: 183. In another example, the anti-CD63 scFv coding sequence is (or comprises a sequence) at least 95%, at least 96%, at least 97%, at least 98%, at least 99%, at least 99.5%, or 100% identical to SEQ ID NO: 191. In another example, the anti-CD63 scFv coding sequence is (or comprises a sequence) at least 95%, at least 96%, at least 97%, at least 98%, at least 99%, at least 99.5%, or 100% identical to SEQ ID NO: 191 and encodes an anti-CD63 scFv protein (or an anti-CD63 scFv protein comprising a sequence) at least 99%, at least 99.5%, or 100% identical to SEQ ID NO: 183. In another example, the anti-CD63 scFv coding sequence is (or comprises a sequence) at least 95%, at least 96%, at least 97%, at least 98%, at least 99%, at least 99.5%, or 100% identical to SEQ ID NO: 191 and encodes an anti-CD63 scFv protein comprising the sequence set forth in SEQ ID NO: 183. In another example, the anti-CD63 scFv coding sequence is (or comprises a sequence) at least 99%, at least 99.5%, or 100% identical to SEQ ID NO: 191. In another example, the anti-CD63 scFv coding sequence is (or comprises a sequence) at least 99%, at least 99.5%, or 100% identical to SEQ ID NO: 191 and encodes an anti-CD63 scFv protein (or an anti-CD63 scFv protein comprising a sequence) at least 99%, at least 99.5%, or 100% identical to SEQ ID NO: 183. In another example, the anti-CD63 scFv coding sequence is (or comprises a sequence) at least 99%, at least 99.5%, or 100% identical to SEQ ID NO: 191 and encodes an anti-CD63 scFv protein comprising the sequence set forth in SEQ ID NO: 183. In another example, the anti-CD63 scFv coding sequence comprises the sequence set forth in SEQ ID NO: 191. In another example, the anti-CD63 scFv coding sequence consists essentially of the sequence set forth in SEQ ID NO: 191. In another example, the anti-CD63 scFv coding sequence consists of the sequence set forth in SEQ ID NO: 191. The anti-CD63 scFv coding sequence can be, for example, CpG-depleted (e.g., fully CpG-depleted) and/or codon optimized. For example, the anti-CD63 scFv coding sequence can be CpG depleted (e.g., fully CpG-depleted) and codon optimized. Optionally, the anti-CD63 scFv coding sequence encodes an anti-CD63 scFv protein (or an anti-CD63 scFv protein comprising a sequence) at least 90%, at least 91%, at least 92%, at least 93%, at least 94%, at least 95%, at least 96%, at least 97%, at least 98%, at least 99%, at least 99.5%, or 100% identical to SEQ ID NO: 183 (and, e.g., retaining CD63-binding activity). Optionally, the anti-CD63 scFv coding sequence encodes an anti-CD63 scFv protein (or an anti-CD63 scFv protein comprising a sequence) at least 95%, at least 96%, at least 97%, at least 98%, at least 99%, at least 99.5%, or 100% identical to SEQ ID NO: 183 (and, e.g., retaining CD63-binding activity). Optionally, the anti-CD63 scFv coding sequence in the above examples encodes an anti-CD63 scFv protein (or an anti-CD63 scFv protein comprising a sequence) at least 99%, at least 99.5%, or 100% identical to SEQ ID NO: 183 (and, e.g., retaining CD63-binding activity). Optionally, the anti-CD63 scFv coding sequence in the above examples encodes an anti-CD63 scFv protein comprising the sequence set forth in SEQ ID NO: 183. Optionally, the anti-CD63 scFv coding sequence in the above examples encodes an anti-CD63 scFv protein consisting essentially of the sequence set forth in SEQ ID NO: 183. Optionally, the anti-CD63 scFv coding sequence in the above examples encodes an anti-CD63 scFv protein consisting of the sequence set forth in SEQ ID NO: 183.

[0296] In one example, the anti-CD63 scFv coding sequence is (or comprises a sequence) at least 90%, at least 91%, at least 92%, at least 93%, at least 94%, at least 95%, at least 96%, at least 97%, at least 98%, at least 99%, at least 99.5%, or 100% identical to SEQ ID NO: 190. In another example, the anti-CD63 scFv coding sequence is (or comprises a sequence) at least 90%, at least 91%, at least 92%, at least 93%, at least 94%, at least 95%, at least 96%, at least 97%, at least 98%, at least 99%, at least 99.5%, or 100% identical to SEQ ID NO: 190 and encodes an anti-CD63 scFv protein (or an anti-CD63 scFv protein comprising a sequence) at least 99%, at least 99.5%, or 100% identical to SEQ ID NO: 183. In another example, the anti-CD63 scFv coding sequence is (or comprises a sequence) at least 90%, at least 91%, at least 92%, at least 93%, at least 94%, at least 95%, at least 96%, at least 97%, at least 98%, at least 99%, at least 99.5%, or 100% identical to SEQ ID NO: 190 and encodes an anti-CD63 scFv protein comprising the sequence set forth in SEQ ID NO: 183. In another example, the anti-CD63 scFv coding sequence is (or comprises a sequence) at least 95%, at least 96%, at least 97%, at least 98%, at least 99%, at least 99.5%, or 100% identical to SEQ ID NO: 190. In another example, the anti-CD63 scFv coding sequence is (or comprises a sequence) at least 95%, at least 96%, at least 97%, at least 98%, at least 99%, at least 99.5%, or 100% identical to SEQ ID NO: 190 and encodes an anti-CD63 scFv protein (or an anti-CD63 scFv protein comprising a sequence) at least 99%, at least 99.5%, or 100% identical to SEQ ID NO: 183. In another example, the anti-CD63 scFv coding sequence is (or comprises a sequence) at least 95%, at least 96%, at least 97%, at least 98%, at least 99%, at least 99.5%, or 100% identical to SEQ ID NO: 190 and encodes an anti-CD63 scFv protein comprising the sequence set forth in SEQ ID NO: 183. In another example, the anti-CD63 scFv coding sequence is (or comprises a sequence) at least 99%, at least 99.5%, or 100% identical to SEQ ID NO: 190. In another example, the anti-CD63 scFv coding sequence is (or comprises a sequence) at least 99%, at least 99.5%, or 100% identical to SEQ ID NO: 190 and encodes an anti-CD63 scFv protein (or an anti-CD63 scFv protein comprising a sequence) at least 99%, at least 99.5%, or 100% identical to SEQ ID NO: 183. In another example, the anti-CD63 scFv coding sequence is (or comprises a sequence) at least 99%, at least 99.5%, or 100% identical to SEQ ID NO: 190 and encodes an anti-CD63 scFv protein comprising the sequence set forth in SEQ ID NO: 183. In another example, the anti-CD63 scFv coding sequence comprises the sequence set forth in SEQ ID NO: 190. In another example, the anti-CD63 scFv coding sequence consists essentially of the sequence set forth in SEQ ID NO: 190. In another example, the anti-CD63 scFv coding sequence consists of the sequence set forth in SEQ ID NO: 190. The anti-CD63 scFv coding sequence can be, for example, CpG-depleted (e.g., fully CpG-depleted) and/or codon optimized. For example, the anti-CD63 scFv coding sequence can be CpG depleted (e.g., fully CpG-depleted) and codon optimized. Optionally, the anti-CD63 scFv coding sequence encodes an anti-CD63 scFv protein (or an anti-CD63 scFv protein comprising a sequence) at least 90%, at least 91%, at least 92%, at least 93%, at least 94%, at least 95%, at least 96%, at least 97%, at least 98%, at least 99%, at least 99.5%, or 100% identical to SEQ ID NO: 183 (and, e.g., retaining CD63-binding activity). Optionally, the anti-CD63 scFv coding sequence encodes an anti-CD63 scFv protein (or an anti-CD63 scFv protein comprising a sequence) at least 95%, at least 96%, at least 97%, at least 98%, at least 99%, at least 99.5%, or 100% identical to SEQ ID NO: 183 (and, e.g., retaining CD63-binding activity). Optionally, the anti-CD63 scFv coding sequence in the above examples encodes an anti-CD63 scFv protein (or an anti-CD63 scFv protein comprising a sequence) at least 99%, at least 99.5%, or 100% identical to SEQ ID NO: 183 (and, e.g., retaining CD63-binding activity). Optionally, the anti-CD63 scFv coding sequence in the above examples encodes an anti-CD63 scFv protein comprising the sequence set forth in SEQ ID NO: 183. Optionally, the anti-CD63 scFv coding sequence in the above examples encodes an anti-CD63 scFv protein consisting essentially of the sequence set forth in SEQ ID NO: 183. Optionally, the anti-CD63 scFv coding sequence in the above examples encodes an anti-CD63 scFv protein consisting of the sequence set forth in SEQ ID NO: 183.

[0297] In one example, the anti-CD63 scFv coding sequence is (or comprises a sequence) at least 90%, at least 91%, at least 92%, at least 93%, at least 94%, at least 95%, at least 96%, at least 97%, at least 98%, at least 99%, at least 99.5%, or 100% identical to SEQ ID NO: 188. In another example, the anti-CD63 scFv coding sequence is (or comprises a sequence) at least 90%, at least 91%, at least 92%, at least 93%, at least 94%, at least 95%, at least 96%, at least 97%, at least 98%, at least 99%, at least 99.5%, or 100% identical to SEQ ID NO: 188 and encodes an anti-CD63 scFv protein (or an anti-CD63 scFv protein comprising a sequence) at least 99%, at least 99.5%, or 100% identical to SEQ ID NO: 183. In another example, the anti-CD63 scFv coding sequence is (or comprises a sequence) at least 90%, at least 91%, at least 92%, at least 93%, at least 94%, at least 95%, at least 96%, at least 97%, at least 98%, at least 99%, at least 99.5%, or 100% identical to SEQ ID NO: 188 and encodes an anti-CD63 scFv protein comprising the sequence set forth in SEQ ID NO: 183. In another example, the anti-CD63 scFv coding sequence is (or comprises a sequence) at least 95%, at least 96%, at least 97%, at least 98%, at least 99%, at least 99.5%, or 100% identical to SEQ ID NO: 188. In another example, the anti-CD63 scFv coding sequence is (or comprises a sequence) at least 95%, at least 96%, at least 97%, at least 98%, at least 99%, at least 99.5%, or 100% identical to SEQ ID NO: 188 and encodes an anti-CD63 scFv protein (or an anti-CD63 scFv protein comprising a sequence) at least 99%, at least 99.5%, or 100% identical to SEQ ID NO: 183. In another example, the anti-CD63 scFv coding sequence is (or comprises a sequence) at least 95%, at least 96%, at least 97%, at least 98%, at least 99%, at least 99.5%, or 100% identical to SEQ ID NO: 188 and encodes an anti-CD63 scFv protein comprising the sequence set forth in SEQ ID NO: 183. In another example, the anti-CD63 scFv coding sequence is (or comprises a sequence) at least 99%, at least 99.5%, or 100% identical to SEQ ID NO: 188. In another example, the anti-CD63 scFv coding sequence is (or comprises a sequence) at least 99%, at least 99.5%, or 100% identical to SEQ ID NO: 188 and encodes an anti-CD63 scFv protein (or an anti-CD63 scFv protein comprising a sequence) at least 99%, at least 99.5%, or 100% identical to SEQ ID NO: 183. In another example, the anti-CD63 scFv coding sequence is (or comprises a sequence) at least 99%, at least 99.5%, or 100% identical to SEQ ID NO: 188 and encodes an anti-CD63 scFv protein comprising the sequence set forth in SEQ ID NO: 183. In another example, the anti-CD63 scFv coding sequence comprises the sequence set forth in SEQ ID NO: 188. In another example, the anti-CD63 scFv coding sequence consists essentially of the sequence set forth in SEQ ID NO: 188. In another example, the anti-CD63 scFv coding sequence consists of the sequence set forth in SEQ ID NO: 188. The anti-CD63 scFv coding sequence can be, for example, CpG-depleted (e.g., fully CpG-depleted) and/or codon optimized. For example, the anti-CD63 scFv coding sequence can be CpG depleted (e.g., fully CpG-depleted) and codon optimized. Optionally, the anti-CD63 scFv coding sequence encodes an anti-CD63 scFv protein (or an anti-CD63 scFv protein comprising a sequence) at least 90%, at least 91%, at least 92%, at least 93%, at least 94%, at least 95%, at least 96%, at least 97%, at least 98%, at least 99%, at least 99.5%, or 100% identical to SEQ ID NO: 183 (and, e.g., retaining CD63-binding activity). Optionally, the anti-CD63 scFv coding sequence encodes an anti-CD63 scFv protein (or an anti-CD63 scFv protein comprising a sequence) at least 95%, at least 96%, at least 97%, at least 98%, at least 99%, at least 99.5%, or 100% identical to SEQ ID NO: 183 (and, e.g., retaining CD63-binding activity). Optionally, the anti-CD63 scFv coding sequence in the above examples encodes an anti-CD63 scFv protein (or an anti-CD63 scFv protein comprising a sequence) at least 99%, at least 99.5%, or 100% identical to SEQ ID NO: 183 (and, e.g., retaining CD63-binding activity). Optionally, the anti-CD63 scFv coding sequence in the above examples encodes an anti-CD63 scFv protein comprising the sequence set forth in SEQ ID NO: 183. Optionally, the anti-CD63 scFv coding sequence in the above examples encodes an anti-CD63 scFv protein consisting essentially of the sequence set forth in SEQ ID NO: 183. Optionally, the anti-CD63 scFv coding sequence in the above examples encodes an anti-CD63 scFv protein consisting of the sequence set forth in SEQ ID NO: 183.

[0298] When specific anti-CD63 scFv or multidomain therapeutic protein nucleic acid constructs sequences are disclosed herein, they are meant to encompass the sequence disclosed or the reverse complement of the sequence. For example, if an anti-CD63 scFv or multidomain therapeutic protein nucleic acid construct disclosed herein consists of the hypothetical sequence 5′-CTGGACCGA-3′, it is also meant to encompass the reverse complement of that sequence (5′-TCGGTCCAG-3′). Likewise, when construct elements are disclosed herein in a specific 5′ to 3′ order, they are also meant to encompass the reverse complement of the order of those elements. One reason for this is that, in many embodiments disclosed herein, the anti-CD63 scFv or multidomain therapeutic protein nucleic acid constructs are part of a single-stranded recombinant AAV vector. Single-stranded AAV genomes are packaged as either sense (plus-stranded) or anti-sense (minus-stranded genomes), and single-stranded AAV genomes of + and -polarity are packaged with equal frequency into mature rAAV virions. See, e.g., LING et al. (2015) J. Mol. Genet. Med. 9(3):175, Zhou et al. (2008) Mol. Ther. 16(3):494-499, and Samulski et al. (1987) J. Virol. 61:3096-3101, each of which is herein incorporated by reference in its entirety for all purposes.

### (C) TfR-Binding Delivery Domain

[0299] The multidomain therapeutic proteins disclosed herein can comprise a TfR-binding delivery domain fused to a GAA. The TfR-binding domain provides binding to the internalization factor transferrin receptor protein 1(TfR; UniProt Ref. P02786). TfR (also known as TR, TfR1, and Trfr) is encoded by the TFRC gene. TfR is expressed in muscle and on brain endothelial cells. Transcytosis of TfR in these cells enables blood-brain-barrier crossing. In some embodiments, the multidomain therapeutic proteins comprising a TfR-binding delivery domain (e.g., scFv) fused to a GAA do not alter transferrin uptake. In some embodiments, the multidomain therapeutic proteins comprising a TfR-binding delivery domain (e.g., scFv) fused to a GAA do not alter iron homeostasis. In some embodiments, the multidomain therapeutic proteins comprising a TfR-binding delivery domain (e.g., scFv) fused to a GAA do not alter transferrin uptake or iron homeostasis.

[0300] Transferrin receptor 1 (TfR) is a membrane receptor involved in the control of iron supply to the cell through the binding of transferrin, the major iron-carrier protein. Transferrin receptor 1 is expressed from the TFRC gene. Transferrin receptor 1 may be referred to, herein, at TFRC. This receptor plays a key role in the control of cell proliferation because iron is essential for sustaining ribonucleotide reductase activity, and is the only enzyme that catalyzes the conversion of ribonucleotides to deoxyribonucleotides. Preferably, the TfR is human TfR (hTfR). See e.g.., Accession numbers NP_ 001121620.1; BAD92491.1; and NP_001300894.1.; and e!Ensembl entry: ENSG00000072274. The human transferrin receptor 1 is expressed in several tissues, including but not limited to: cerebral cortex; cerebellum; hippocampus; caudate; parathyroid gland; adrenal gland; bronchus; lung; oral mucosa; esophagus; stomach; duodenum; small intestine; colon; rectum; liver; gallbladder; pancreas; kidney; urinary bladder; testis; epididymis; prostate; vagina; ovary; fallopian tube; endometrium; cervix; placenta; breast; heart muscle; smooth muscle; soft tissue; skin; appendix; lymph node; tonsil; and bone marrow. A related transferrin receptor is transferrin receptor 2 (TfR2). Human transferrin receptor 2 bears about 45% sequence identity to human transferrin receptor 1. Trinder & Baker, Transferrin receptor 2: a new molecule in iron metabolism. Int J Biochem Cell Biol. 2003 Mar;35(3):292-6. Unless otherwise stated, transferrin receptor as used herein generally refers to transferrin receptor 1 (e.g., human transferrin receptor 1).

[0301] Human Transferrin (Tf) is a single chain, 80 kDa member of the anion-binding superfamily of proteins. Transferrin is a 698 amino acid precursor that is divided into a 19 aa signal sequence plus a 679 aa mature segment that typically contains 19 intrachain disulfide bonds. The N- and C-terminal flanking regions (or domains) bind ferric iron through the interaction of an obligate anion (e.g., bicarbonate) and four amino acids (His, Asp, and two Tyr). Apotransferrin (or iron-free) will initially bind one atom of iron at the C-terminus, and this is followed by subsequent iron binding by the N-terminus to form holotransferrin (diferric Tf, Holo-Tf). Through its C-terminal iron-binding domain, holotransferrin will interact with the TfR on the surface of cells where it is internalized into acidified endosomes. Iron dissociates from the Tf molecule within these endosomes, and is transported into the cytosol as ferrous iron. In addition to TfR, transferrin is reported to bind to cubulin, IGFBP3, microbial iron-binding proteins and liver-specific TfR2.

[0302] The blood-brain barrier (BBB) is located within the microvasculature of the brain, and it regulates passage of molecules from the blood to the brain. Burkhart et al., Accessing targeted nanoparticles to the brain: the vascular route. Curr Med Chem. 2014;21(36):4092-9. The transcellular passage through the brain capillary endothelial cells can take place via 1) cell entry by leukocytes; 2) carrier-mediated influx of e.g., glucose by glucose transporter 1 (GLUT-1), amino acids by e.g., the L- type amino acid transporter 1 (LAT-1) and small peptides by e.g., organic anion-transporting peptide-B (OATP-B); 3) paracellular passage of small hydrophobic molecules; 4) adsorption-mediated transcytosis of e.g., albumin and cationized molecules; 5) passive diffusion of lipid soluble, non-polar solutes, including CO₂ and O₂; and 5) receptor-mediated transcytosis of, e.g., insulin by the insulin receptor and Tf by the TfR. Johnsen et al., Targeting the transferrin receptor for brain drug delivery, Prog Neurobiol. 2019 Oct;181:101665.

[0303] For example, anti-TfR:GAA fusion proteins exhibiting high affinity to the transferrin receptor and superior blood-brain barrier crossing are provided. Surprisingly, fusions exhibiting high binding affinity to TfR crossed the blood-brain barrier more efficiently than that of low affinity binders. The fusions of the present invention have an ability to efficiently deliver GAA to the brain and, thus, are an effective treatment of glycogen storage diseases such as Pompe Disease.

[0304] Provided herein are antigen-binding proteins, such as antibodies, antigen-binding fragments thereof, such as Fabs and scFvs, that bind specifically to the transferrin receptor, preferably the human transferrin receptor 1 (anti-hTfR). For example, in an embodiment, the anti-hTfR is in the form of a fusion protein. The fusion protein includes the anti-hTfR antigen-binding protein fused to GAA. The anti-hTfRs efficiently cross the blood-brain barrier (BBB) and can, thereby, deliver the fused GAA to the brain.

[0305] An antigen-binding protein that specifically binds to transferrin receptor and fusions thereof, for example, a tag such as His₆ and/or myc (e.g., human transferrin receptor (e.g., REGN2431) or monkey transferrin receptor (e.g., REGN2054)) binds at about 25° C., e.g., in a surface plasmon resonance assay, with a K_{D} of about 20 nM or a higher affinity. Such an antigen-binding protein may be referred to as “anti-TfR.”

[0306] In an embodiment, an anti-hTfR scFv:GAA fusion protein includes an scFv comprising the arrangement of variable regions as follows LCVR-HCVR or HCVR-LCVR, wherein the HCVR and LCVR are optionally connected by a linker and the scFv is connected, optionally by a linker, to GAA (e.g., LCVR-(Gly₄Ser)₃-HCVR-(Gly₄Ser)₂)-GAA; or LCVR-(Gly₄Ser)₃-HCVR-(Gly₄Ser)₂)-GAA) (Gly₄Ser = SEQ ID NO: 600)). In one example, the linker between the HCVR and LCVR comprises, consists essentially of, or consists of three such repeats (SEQ ID NO: 713). For example, the coding sequence for the linker can comprise, consist essentially of, or consist of any one of SEQ ID NOS: 715-719. In another example, the linker between the HCVR and LCVR comprises, consists essentially of, or consists of two such repeats (SEQ ID NO: 714). For example, the coding sequence for the linker can comprise, consist essentially of, or consist of any one of SEQ ID NOS: 720-726. In another example, the linker between the HCVR and LCVR comprises, consists essentially of, or consists of one such repeat (SEQ ID NO: 600). For example, the coding sequence for the linker can comprise, consist essentially of, or consist of SEQ ID NO: 727. In one example, the linker between the scFv and GAA comprises, consists essentially of, or consists of three such repeats (SEQ ID NO: 713). For example, the coding sequence for the linker can comprise, consist essentially of, or consist of any one of SEQ ID NOS: 715-719. In another example, the linker between the scFv and GAA comprises, consists essentially of, or consists of two such repeats (SEQ ID NO: 714). For example, the coding sequence for the linker can comprise, consist essentially of, or consist of any one of SEQ ID NOS: 720-726. In another example, the linker between the scFv and GAA comprises, consists essentially of, or consists of one such repeat (SEQ ID NO: 600). For example, the coding sequence for the linker can comprise, consist essentially of, or consist of SEQ ID NO: 727.

[0307] An anti-hTfR:GAA optionally comprises a signal peptide, connected to the antigen-binding protein that binds specifically to transferrin receptor (TfR), preferably, human transferrin receptor (hTfR) which is fused (optionally by a linker) to GAA. In an embodiment, the signal peptide is the mROR signal sequence (e.g., mROR signal sequence-LCVR-(Gly₄Ser)₃-HCVR-(Gly₄Ser)₂)-GAA; or LCVR-(Gly₄Ser)₃-HCVR-(Gly₄Ser)₂)-GAA) (Gly₄Ser = SEQ ID NO: 600)). The term “fused” or “tethered” with regard to fused polypeptides refers to polypeptides joined directly or indirectly (e.g., via a linker or other polypeptide).

[0308] In an embodiment of the invention, the assignment of amino acids to each framework or CDR domain in an immunoglobulin is in accordance with the definitions of Sequences of Proteins of Immunological Interest, Kabat et al.; National Institutes of Health, Bethesda, Md.; 5^{th} ed.; NIH Publ. No. 91-3242 (1991); Kabat (1978) Adv. Prot. Chem. 32:1-75; Kabat et al., (1977) J. Biol. Chem. 252:6609-6616; Chothia, et al., (1987) J Mol. Biol. 196:901-917 or Chothia, et al., (1989) Nature 342: 878-883. Thus, included are antibodies and antigen-binding fragments including the CDRs of a V_{H} and the CDRs of a V_{L}, which V_{H} and V_{L} comprise amino acid sequences as set forth herein (see, e.g., sequences of Table 29, or variants thereof), wherein the CDRs are as defined according to Kabat and/or Chothia.

[0309] In some multidomain therapeutic proteins, the TfR-binding delivery domain is an antibody, an antibody fragment or other antigen-binding protein. In some multidomain therapeutic proteins, the TfR-binding delivery domain is an antigen-binding protein. Examples of antigen-binding proteins include, for example, a receptor-fusion molecule, a trap molecule, a receptor-Fc fusion molecule, an antibody, an Fab fragment, an F(ab′)2 fragment, an Fd fragment, an Fv fragment, a single-chain Fv (scFv) molecule, a dAb fragment, an isolated complementarity determining region (CDR), a CDR3 peptide, a constrained FR3-CDR3-FR4 peptide, a domain-specific antibody, a single domain antibody, a domain-deleted antibody, a chimeric antibody, a CDR-grafted antibody, a diabody, a triabody, a tetrabody, a minibody, a nanobody, a monovalent nanobody, a bivalent nanobody, a small modular immunopharmaceutical (SMIP), a camelid antibody (VHH heavy chain homodimeric antibody), and a shark variable IgNAR domain.

[0310] Provided herein are antibodies that bind specifically to the human transferrin receptor 1. The term “antibody,” as used herein, refers to immunoglobulin molecules comprising four polypeptide chains, two heavy chains (HCs) and two light chains (LCs), inter-connected by disulfide bonds. In an embodiment, each antibody heavy chain (HC) comprises a heavy chain variable region (“HCVR” or “V_{H}”) (e.g., comprising SEQ ID NO: 217, 227, 237, 247, 257, 267, 277, 287, 297, 307, 317, 327, 337, 347, 357, 367, 377, 387, 397, 407, 417, 427, 437, 447, 457, 467, 477, 487, 497, 507, 517, and/or 527 or a variant thereof) and a heavy chain constant region (e.g., human IgG, human IgG1 or human IgG4); and each antibody light chain (LC) comprises a light chain variable region (“LCVR or “V_{L}”) (e.g., SEQ ID NO: 222, 232, 242, 252, 262, 272, 282, 292, 302, 312, 322, 332, 342, 352, 362, 372, 382, 392, 402, 412, 422, 432, 442, 452, 462, 472, 482, 492, 502, 512, 522, and/or 532 or a variant thereof) and a light chain constant region (e.g., human kappa or human lambda). The V_{H} and V_{L} regions can be further subdivided into regions of hypervariability, termed complementarity determining regions (CDR), interspersed with regions that are more conserved, termed framework regions (FR) Each V_{H} and V_{L} comprises three CDRs and four FRs. Anti-TfR antibodies disclosed herein can also be fused to GAA.

[0311] An anti-TfR antigen-binding protein of the present invention may be an antigen-binding fragment of an antibody which may be tethered to GAA. The terms “antigen-binding portion” or “antigen-binding fragment” of an antibody, as used herein, refers to an immunoglobulin molecule that binds antigen but that does not include all of the sequences of a full antibody (preferably, the full antibody is an IgG). Non-limiting examples of antigen-binding fragments include: (i) Fab fragments; (ii) F(ab′)₂ fragments; (iii) Fd fragments; (iv) Fv fragments; (v) single-chain Fv (scFv) molecules; and (vi) dAb fragments; consisting of the amino acid residues that mimic the hypervariable region of an antibody (e.g., an isolated complementarity determining region (CDR) such as a CDR3 peptide), or a constrained FR3-CDR3-FR4 peptide. Other engineered molecules, such as domain-specific antibodies, single domain antibodies, domain-deleted antibodies, chimeric antibodies, CDR-grafted antibodies, diabodies, triabodies, tetrabodies, minibodies and small modular immunopharmaceuticals (SMIPs), are also encompassed within the expression “antigen-binding fragment,” as used herein.

[0312] An anti-TfR antigen-binding protein may be an scFv which may be tethered to a GAA. An scFv (single chain fragment variable) has variable regions of heavy (V_{H}) and light (V_{L}) domains (in either order), which, preferably, are joined together by a flexible linker (e.g., peptide linker). The length of the flexible linker used to link both of the V regions may be important for yielding the correct folding of the polypeptide chain. Previously, it has been estimated that the peptide linker must span 3.5 nm (35 Å) between the carboxy terminus of the variable domain and the amino terminus of the other domain without affecting the ability of the domains to fold and form an intact antigen-binding site (Huston et al., Protein engineering of single-chain Fv analogs and fusion proteins. Methods in Enzymology. 1991;203:46-88). In an embodiment, the linker comprises an amino acid sequence of such length to separate the variable domains by about 3.5 nm.

[0313] An antigen-binding fragment of an antibody will, in an embodiment, comprise at least one variable domain. The variable domain may be of any size or amino acid composition and will generally comprise at least one CDR, which is adjacent to or in frame with one or more framework sequences. In antigen-binding fragments having a V_{H} domain associated with a V_{L} domain, the V_{H} and V_{L} domains may be situated relative to one another in any suitable arrangement. For example, the variable region may be dimeric and contain V_{H} - V_{H}, V_{H} - V_{L} or V_{L} - V_{L} dimers. Alternatively, the antigen-binding fragment of an antibody may contain a monomeric V_{H} or V_{L} domain.

[0314] “Isolated” antigen-binding proteins (e.g., antibodies or antigen-binding fragments thereof), polypeptides, polynucleotides and vectors, are at least partially free of other biological molecules from the cells or cell culture from which they are produced. Such biological molecules include nucleic acids, proteins, other antibodies or antigen-binding fragments, lipids, carbohydrates, or other material such as cellular debris and growth medium. An isolated antigen-binding protein may further be at least partially free of expression system components such as biological molecules from a host cell or of the growth medium thereof. Generally, the term “isolated” is not intended to refer to a complete absence of such biological molecules (e.g., minor or insignificant amounts of impurity may remain) or to an absence of water, buffers, or salts or to components of a pharmaceutical formulation that includes the antigen-binding proteins (e.g., antibodies or antigen-binding fragments).

[0315] An anti-TfR antigen-binding protein of the present invention may be a monoclonal antibody or an antigen-binding fragment of a monoclonal antibody which may be tethered to GAA. The present invention includes monoclonal anti-TfR antigen-binding proteins, e.g., antibodies and antigen-binding fragments thereof, as well as monoclonal compositions comprising a plurality of isolated monoclonal antigen-binding proteins. The term “monoclonal antibody” or “mAb,” as used herein, refers to a member of a population of substantially homogeneous antibodies, i.e., the antibody molecules comprising the population are identical in amino acid sequence except for possible naturally occurring mutations that may be present in minor amounts. A “plurality” of such monoclonal antibodies and fragments in a composition refers to a concentration of identical (i.e., as discussed above, in amino acid sequence except for possible naturally occurring mutations that may be present in minor amounts) antibodies and fragments which is above that which would normally occur in nature, e.g., in the blood of a host organism such as a mouse or a human.

[0316] In an embodiment, an anti-TfR antigen-binding protein, e.g., antibody or antigen-binding fragment (which may be tethered to a Payload) comprises a heavy chain constant domain, e.g., of the type IgA (e.g., IgA1 or IgA2), IgD, IgE, IgG (e.g., IgG1, IgG2, IgG3 and IgG4) or IgM. In an embodiment of the invention, an antigen-binding protein, e.g., antibody or antigen-binding fragment, comprises a light chain constant domain, e.g., of the type kappa or lambda.

[0317] Included herein are human anti-TfR antigen-binding proteins which may be tethered to GAA. The term “human” antigen-binding protein, such as an antibody or antigen-binding fragment, as used herein, includes antibodies and fragments having variable and constant regions derived from human germline immunoglobulin sequences whether in a human cell or grafted into a non-human cell, e.g., a mouse cell. See, e.g., US8502018, US6596541 or US5789215. The anti-TfR human mAbs of the invention may include amino acid residues not encoded by human germline immunoglobulin sequences (e.g., mutations introduced by random or site-specific mutagenesis in vitro or by somatic mutation in vivo), for example in the CDRs and in particular CDR3. However, the term “human antibody,” as used herein, is not intended to include mAbs in which CDR sequences derived from the germline of another mammalian species (e.g., mouse) have been grafted onto human FR sequences. The term includes antibodies recombinantly produced in a non-human mammal or in cells of a non-human mammal. The term is not intended to include natural antibodies directly isolated from a human subject.

[0318] Also included herein are anti-TfR chimeric antigen-binding proteins, e.g., antibodies and antigen-binding fragments thereof (which may be tethered to GAA), and methods of use thereof. As used herein, a “chimeric antibody” is an antibody having the variable domain from a first antibody and the constant domain from a second antibody, where the first and second antibodies are from different species. (see, e.g., US4816567; and Morrison et al., (1984) Proc. Natl. Acad. Sci. USA 81: 6851-6855).

[0319] The term “recombinant” anti-TfR antigen-binding proteins, such as antibodies or antigen-binding fragments thereof (which may be tethered to GAA), refers to such molecules created, expressed, isolated or obtained by technologies or methods known in the art as recombinant DNA technology which include, e.g., DNA splicing and transgenic expression. The term includes antibodies expressed in a non-human mammal (including transgenic non-human mammals, e.g., transgenic mice), or a cell (e.g., CHO cells) such as a cellular expression system or isolated from a recombinant combinatorial human antibody library.

[0320] A “variant” of a polypeptide refers to a polypeptide comprising an amino acid sequence that is at least about 70-99.9% (e.g., 70, 72, 74, 75, 76, 79, 80, 81, 82, 83, 84, 85, 86, 87, 88, 89, 90, 91, 92, 93, 94, 95, 96, 97, 98, 99, 99.5, 99.9%) identical or similar to a referenced amino acid sequence that is set forth herein (e.g., any of SEQ ID NOs: 217-220; 222-225; 227-230; 232-235; 237-240; 242-245; 247-250; 252-255; 257-260; 262-265; 267-270; 272-275; 277-280; 282-285; 287-290; 292-295; 297-300; 302-305; 307-310; 312-315; 317-320; 322-325; 327-330; 332-335; 337-340; 342-345; 347-350; 352-355; 357-360; 362-365; 367-370; 372-375; 377-380; 382-385; 387-390; 392-395; 397-400; 402-405; 407-410; 412-415; 417-420; 422-425; 427-430; 432-435; 437-440; 442-445; 447-450; 452-455; 457-460; 462-465; 467-470; 472-475; 477-480; 482-485; 487-490; 492-495; 497-500; 502-505; 507-510; 512-515; 517-520; 522-525; 527-530; 532-535; 703 (optionally not including the N-terminal MHRPRRRGTRPPPLALLAALLLAARGADA (SEQ ID NO: 673)), 704 (optionally not including the N-terminal MHRPRRRGTRPPPLALLAALLLAARGADA (SEQ ID NO: 673)), 705 (optionally not including the N-terminal MHRPRRRGTRPPPLALLAALLLAARGADA (SEQ ID NO: 673)), 706 (optionally not including the N-terminal MHRPRRRGTRPPPLALLAALLLAARGADA (SEQ ID NO: 673)); 538-573, 603-672, or 675-702); when the comparison is performed by a BLAST algorithm wherein the parameters of the algorithm are selected to give the largest match between the respective sequences over the entire length of the respective reference sequences (e.g., expect threshold: 10; word size: 3; max matches in a query range: 0; BLOSUM 62 matrix; gap costs: existence 11, extension 1; conditional compositional score matrix adjustment) and/or comprising the amino acid sequence but having one or more (e.g., 1, 2, 3, 4, 5, 6, 7, 8, 9 or 10) mutations (e.g., point mutation, insertion, truncation, and/or deletion). Preferably, functional GAA ectodomain.

[0321] The following references relate to BLAST algorithms often used for sequence analysis: BLAST ALGORITHMS: Altschul et al. (2005) FEBS J. 272(20): 5101-5109; Altschul, S. F., et al., (1990) J. Mol. Biol. 215:403-410; Gish, W., et al., (1993) Nature Genet. 3:266-272; Madden, T. L., et al., (1996) Meth. Enzymol. 266:131-141; Altschul, S. F., et al., (1997) Nucleic Acids Res. 25:3389-3402; Zhang, J., et al., (1997) Genome Res. 7:649-656; Wootton, J. C., et al., (1993) Comput. Chem. 17:149-163; Hancock, J. M. et al., (1994) Comput. Appl. Biosci. 10:67-70; ALIGNMENT SCORING SYSTEMS: Dayhoff, M. O., et al., “A model of evolutionary change in proteins.” in Atlas of Protein Sequence and Structure, (1978) vol. 5, suppl. 3. M. O. Dayhoff (ed.), pp. 345-352, Natl. Biomed. Res. Found., Washington, D.C.; Schwartz, R. M., et al., “Matrices for detecting distant relationships.” in Atlas of Protein Sequence and Structure, (1978) vol. 5, suppl. 3.” M. O. Dayhoff (ed.), pp. 353-358, Natl. Biomed. Res. Found., Washington, D.C.; Altschul, S. F., (1991) J. Mol. Biol. 219:555-565; States, D. J., et al., (1991) Methods 3:66-70; Henikoff, S., et al., (1992) Proc. Natl. Acad. Sci. USA 89:10915-10919; Altschul, S. F., et al., (1993) J. Mol. Evol. 36:290-300; ALIGNMENT STATISTICS: Karlin, S., et al., (1990) Proc. Natl. Acad. Sci. USA 87:2264-2268; Karlin, S., et al., (1993) Proc. Natl. Acad. Sci. USA 90:5873-5877; Dembo, A., et al., (1994) Ann. Prob. 22:2022-2039; and Altschul, S. F. “Evaluating the statistical significance of multiple distinct local alignments.” in Theoretical and Computational Methods in Genome Research (S. Suhai, ed.), (1997) pp. 1-14, Plenum, N.Y.

[0322] In an embodiment of the invention, an anti-hTfR:Payload or anti-hTfR:Payload (e.g., in scFv, Fab, antibody or antigen-binding fragment thereof format), e.g., wherein the Payload is human GAA, exhibits one or more of the following characteristics:
[0323] Affinity (K_{D}) for binding to human TfR at 25° C. in surface plasmon resonance format of about 41 nM or a higher affinity (e.g., about 1 or 0.1 nM or about 0.18 to about 1.2 nM, or higher);
[0324] Affinity (K_{D}) for binding to monkey TfR at 25° C. in surface plasmon resonance format of about 0 nM (no detectable binding) or a higher affinity (e.g., about 20 nM or higher);
[0325] Ratio of K_{D} for binding to monkey TfR/human TfR at 25° C. in surface plasmon resonance format of from 0 to 278 (e.g., about 17 or 18);
[0326] Blocks about 3, 5, 10 or 13 % hTfR (e.g., Hmm-hTFRC such as REGN2431) binding to Human Holo-Tf when in Fab format (IgG1), e.g., no more than about 45% blocking;
[0327] Blocks about 6, 8, 10 or 13 % hTfR (e.g., Hmm-hTFRC such as REGN2431) binding to Human Holo-Tf when in scFv (V_{K}-V_{H}) format, e.g., no more than about 45% blocking;
[0328] Blocks about 11, 17, 23 or 26 % hTfR (e.g., Hmm-hTFRC such as REGN2431) binding to Human Holo-Tf when in scFv (V_{H}-V_{L}) format, e.g., no more than about 45% blocking;
[0329] Exhibits a ratio of about 1 or greater; 0.67 or greater; 1.08 or greater; 0.91 or greater; 0.65 or greater; 0.55 or greater; 0.50 or greater; 0.27 or greater; 0.72 or greater; 1.05 or greater; 0.49 or greater; 0.29 or greater; 1.29 or greater; 1.72 or greater; 1.79 or greater; 3.08 or greater; 1.24or greater; 0.59 or greater; or 0.47 or greater (or about 1-2 or greater) mature hGAA protein in brain (normalized to that of positive control 8D3:GAA scFv) in mice (e.g., Tfrc^{hum/hum} knock-in mice) administered the molecule via HDD, when in anti-hTfR scFv:hGAA format; or delivers mature human GAA protein to the brain of humans administered said scFv:hGAA molecule;
[0330] Exhibits a ratio of about 0.44, 0.05, 1.13 or 0.60 (about 0.1-1.2) mature hGAA protein in brain parenchyma (normalized to that of positive control 8D3:GAA scFv) in mice (e.g., Tfrc^{hum/hum} knock-in mice) administered the molecule via HDD, when in anti-hTfR scFv:hGAA format; or delivers mature human GAA protein to the brain parenchyma of humans administered said scFv:hGAA molecule;
[0331] Exhibits a ratio of about 0.67, 1.80, 1.78 or 7.74 (about 1-2) mature hGAA protein in quadriceps (normalized to that of positive control 8D3:GAA scFv) in mice (e.g., Tfrc^{hum/hum} knock-in mice) administered the molecule via HDD, when in anti-hTfR scFv:hGAA format; or delivers mature human GAA protein to the quadricep or other muscle tissue of humans administered said scFv:hGAA molecule;
[0332] Exhibits a ratio of about 0.94, 0.49, 0.61 or 1.90 (about 0.1-1.2) mature hGAA protein in brain parenchyma (normalized to that of positive control 8D3:GAA scFv) in mice (e.g., Tfrc^{hum} knock-in mice) administered the molecule via AAV8 liver depot, when in anti-hTfR scFv:hGAA format; or delivers mature human GAA protein to the brain parenchyma of humans administered said scFv:hGAA molecule via viral, e.g., AAV, liver depot or parenterally delivered in protein scFv:hGAA fusion format;
[0333] Delivers mature hGAA protein to serum, liver, cerebrum, cerebellum, spinal cord, heart and/or quadricep in mice (e.g., Tfrc^{hum} knock-in mice) administered the molecule via AAV8 liver depot, when in anti-hTfR scFv:hGAA format; or delivers mature human GAA protein to the serum, liver, cerebrum, cerebellum, spinal cord, heart and/or quadricep of humans administered said scFv:hGAA molecule via viral, e.g., AAV, liver depot or parenterally delivered in protein scFv:hGAA fusion format;;
[0334] Reduces glycogen stored in cerebrum, cerebellum, spinal cord, heart and/or quadricep in mice (e.g., Tfrc^{hum} knock-in mice) administered the molecule via AAV8 liver depot, when in anti-hTfR scFv:hGAA format; e.g., by at least 75% to greater than 95% or greater than 99%; or reduces glycogen stored in cerebrum, cerebellum, spinal cord, heart and/or quadricep of humans administered said scFv:hGAA molecule via viral, e.g., AAV, liver depot, or parenterally delivered in protein scFv:hGAA fusion format;
[0335] Reduces glycogen levels in tissues (e.g., cerebellum) of Gaa^{-/-} / Tfrc^{hum} mice treated with liver-depot AAV8 anti-hTFRC scfv:hGAA (e.g., 4e11vg/kg AAV8) by at least about 90% (e.g., about 95% or more) relative to untreated Gaa^{-/-} / Tfrc^{hum} mice;
[0336] Reduces glycogen levels in tissues (e.g., quadricep) of Gaa^{-/-} / Tfrc^{hum} mice treated with liver-depot AAV8 anti-hTFRC scfv:hGAA (e.g., 4e11vg/kg AAV8) by at least about 89% (e.g., about 90% or 91% or more) relative to untreated Gaa^{-/-} / Tfrc^{hum} mice; or of humans treated with the fusion, e.g., by parenteral deliver of the fusion protein;
[0337] Does not cause abnormal iron homeostasis when administered (e.g., by HDD or AAV8 episomal liver depot) to Tfrc^{hum} mice; e.g., wherein the mice maintain normal serum, heart, liver and/or spleen iron levels, normal total iron-binding capacity (TIBC), and/or normal hepcidin levels); or when administered to humans, e.g., by parenteral deliver of the fusion protein;
[0338] When chromosomally inserted (e.g., into the albumin gene locus) or delivered episomally to a subject (e.g., to a human or Gaa^{-/-}/Tfrc^{hum/hum} mouse), for example, in an AAV8 vector, DNA encoding the fusion causes expression of mature human GAA to serum, liver, cerebrum and/or quadricep; and/or
[0339] When chromosomally inserted (e.g., into the albumin gene locus) or delivered episomally (e.g., to a human or Gaa^{-/-}/Tfrc^{hum/hum} mouse), for example, in an AAV8 vector, DNA encoding the fusion reduces glycogen levels in the cerebrum and/or quadricep.
^{∗} Tfrc^{hum} or Tfrc^{hum/hum} are homozygous knock-in mice.

[0340] The amino acid sequences of domains in anti-human transferrin receptor antigen-binding proteins of fusions disclosed herein are summarized below in Table 29. For example, anti-human transferrin receptor 1 antibodies and antigen-binding fragments thereof (e.g., scFvs and Fabs) comprising the HCVR and LCVR of the molecules in Table 29; or comprising the CDRs thereof, fused to GAA, are disclosed herein.

[0341] As discussed, an anti-hTfR:GAA scFv fusion protein (e.g., 31874B; 31863B; 69348; 69340; 69331; 69332; 69326; 69329; 69323; 69305; 69307; 12795B; 12798B; 12799B; 12801B; 12802B; 12808B; 12812B; 12816B; 12833B; 12834B; 12835B; 12847B; 12848B; 12843B; 12844B; 12845B; 12839B; 12841B; 12850B; 69261; or 69263) comprises an optional signal peptide, connected to an scFv (e.g., including a V_{L} and a V_{H} optionally connected by a linker), connected to an option linker, connected to a GAA. For example, the optional signal peptide can be the signal peptide from Mus musculus Ror1 (e.g., consisting of the amino acids

MHRPRRRGTRPPPLALLAALLLAARGADA (SEQ ID NO: 673).

[0342] In a particular multidomain therapeutic protein, the TfR-binding delivery domain is an anti-TfR scFv. For example, the scFv can include a V_{L} and a V_{H} optionally connected by a linker.

[0343] In one example, the anti-hTfR scFv can comprise: (i) a heavy chain variable region that comprises the HCDR1, HCDR2 and HCDR3 of a HCVR comprising the amino acid sequence set forth in SEQ ID NO: 217, 227, 237, 247, 257, 267, 277, 287, 297, 307, 317, 327, 337, 347, 357, 367, 377, 387, 397, 407, 417, 427, 437, 447, 457, 467, 477, 487, 497, 507, 517, or 527; and/or (ii) a light chain variable region that comprises the LCDR1, LCDR2 and LCDR3 of a LCVR comprising the amino acid sequence set forth in SEQ ID NO: 222, 232, 242, 252, 262, 272, 282, 292, 302, 312, 322, 332, 342, 352, 362, 372, 382, 392, 402, 412, 422, 432, 442, 452, 462, 472, 482, 492, 502, 512, 522, or 532.

[0344] In another example, the anti-TfR scFv can comprise: (1) a HCVR comprising the HCDR1, HCDR2 and HCDR3 of a HCVR that comprises the amino acid sequence set forth in SEQ ID NO: 217 (or a variant thereof); and a LCVR comprising the LCDR1, LCDR2 and LCDR3 of a LCVR that comprises the amino acid sequence set forth in SEQ ID NO: 222 (or a variant thereof); (2) a HCVR comprising the HCDR1, HCDR2 and HCDR3 of a HCVR that comprises the amino acid sequence set forth in SEQ ID NO: 227 (or a variant thereof); and a LCVR comprising the LCDR1, LCDR2 and LCDR3 of a LCVR that comprises the amino acid sequence set forth in SEQ ID NO: 232 (or a variant thereof); (3) a HCVR comprising the HCDR1, HCDR2 and HCDR3 of a HCVR that comprises the amino acid sequence set forth in SEQ ID NO: 237 (or a variant thereof); and a LCVR comprising the LCDR1, LCDR2 and LCDR3 of a LCVR that comprises the amino acid sequence set forth in SEQ ID NO: 242 (or a variant thereof); (4) a HCVR comprising the HCDR1, HCDR2 and HCDR3 of a HCVR that comprises the amino acid sequence set forth in SEQ ID NO: 247 (or a variant thereof); and a LCVR comprising the LCDR1, LCDR2 and LCDR3 of a LCVR that comprises the amino acid sequence set forth in SEQ ID NO: 252 (or a variant thereof); (5) a HCVR comprising the HCDR1, HCDR2 and HCDR3 of a HCVR that comprises the amino acid sequence set forth in SEQ ID NO: 257 (or a variant thereof); and a LCVR comprising the LCDR1, LCDR2 and LCDR3 of a LCVR that comprises the amino acid sequence set forth in SEQ ID NO: 262 (or a variant thereof); (6) a HCVR comprising the HCDR1, HCDR2 and HCDR3 of a HCVR that comprises the amino acid sequence set forth in SEQ ID NO: 267 (or a variant thereof); and a LCVR comprising the LCDR1, LCDR2 and LCDR3 of a LCVR that comprises the amino acid sequence set forth in SEQ ID NO: 272 (or a variant thereof); (7) a HCVR comprising the HCDR1, HCDR2 and HCDR3 of a HCVR that comprises the amino acid sequence set forth in SEQ ID NO: 277 (or a variant thereof); and a LCVR comprising the LCDR1, LCDR2 and LCDR3 of a LCVR that comprises the amino acid sequence set forth in SEQ ID NO: 282 (or a variant thereof); (8) a HCVR comprising the HCDR1, HCDR2 and HCDR3 of a HCVR that comprises the amino acid sequence set forth in SEQ ID NO: 287 (or a variant thereof); and a LCVR comprising the LCDR1, LCDR2 and LCDR3 of a LCVR that comprises the amino acid sequence set forth in SEQ ID NO: 292 (or a variant thereof); (9) a HCVR comprising the HCDR1, HCDR2 and HCDR3 of a HCVR that comprises the amino acid sequence set forth in SEQ ID NO: 297 (or a variant thereof); and a LCVR comprising the LCDR1, LCDR2 and LCDR3 of a LCVR that comprises the amino acid sequence set forth in SEQ ID NO: 302 (or a variant thereof); (10) a HCVR comprising the HCDR1, HCDR2 and HCDR3 of a HCVR that comprises the amino acid sequence set forth in SEQ ID NO: 307 (or a variant thereof); and a LCVR comprising the LCDR1, LCDR2 and LCDR3 of a LCVR that comprises the amino acid sequence set forth in SEQ ID NO: 312 (or a variant thereof); (11) a HCVR comprising the HCDR1, HCDR2 and HCDR3 of a HCVR that comprises the amino acid sequence set forth in SEQ ID NO: 317 (or a variant thereof); and a LCVR comprising the LCDR1, LCDR2 and LCDR3 of a LCVR that comprises the amino acid sequence set forth in SEQ ID NO: 322 (or a variant thereof); (12) a HCVR comprising the HCDR1, HCDR2 and HCDR3 of a HCVR that comprises the amino acid sequence set forth in SEQ ID NO: 327 (or a variant thereof); and a LCVR comprising the LCDR1, LCDR2 and LCDR3 of a LCVR that comprises the amino acid sequence set forth in SEQ ID NO: 332 (or a variant thereof); (13) a HCVR comprising the HCDR1, HCDR2 and HCDR3 of a HCVR that comprises the amino acid sequence set forth in SEQ ID NO: 337 (or a variant thereof); and a LCVR comprising the LCDR1, LCDR2 and LCDR3 of a LCVR that comprises the amino acid sequence set forth in SEQ ID NO: 342 (or a variant thereof); (14) a HCVR comprising the HCDR1, HCDR2 and HCDR3 of a HCVR that comprises the amino acid sequence set forth in SEQ ID NO: 347 (or a variant thereof); and a LCVR comprising the LCDR1, LCDR2 and LCDR3 of a LCVR that comprises the amino acid sequence set forth in SEQ ID NO: 352 (or a variant thereof); (15) a HCVR comprising the HCDR1, HCDR2 and HCDR3 of a HCVR that comprises the amino acid sequence set forth in SEQ ID NO: 357 (or a variant thereof); and a LCVR comprising the LCDR1, LCDR2 and LCDR3 of a LCVR that comprises the amino acid sequence set forth in SEQ ID NO: 362 (or a variant thereof); (16) a HCVR comprising the HCDR1, HCDR2 and HCDR3 of a HCVR that comprises the amino acid sequence set forth in SEQ ID NO: 367 (or a variant thereof); and a LCVR comprising the LCDR1, LCDR2 and LCDR3 of a LCVR that comprises the amino acid sequence set forth in SEQ ID NO: 372 (or a variant thereof); (17) a HCVR comprising the HCDR1, HCDR2 and HCDR3 of a HCVR that comprises the amino acid sequence set forth in SEQ ID NO: 377 (or a variant thereof); and a LCVR comprising the LCDR1, LCDR2 and LCDR3 of a LCVR that comprises the amino acid sequence set forth in SEQ ID NO: 382 (or a variant thereof); (18) a HCVR comprising the HCDR1, HCDR2 and HCDR3 of a HCVR that comprises the amino acid sequence set forth in SEQ ID NO: 387 (or a variant thereof); and a LCVR comprising the LCDR1, LCDR2 and LCDR3 of a LCVR that comprises the amino acid sequence set forth in SEQ ID NO: 392 (or a variant thereof); (19) a HCVR comprising the HCDR1, HCDR2 and HCDR3 of a HCVR that comprises the amino acid sequence set forth in SEQ ID NO: 397 (or a variant thereof); and a LCVR comprising the LCDR1, LCDR2 and LCDR3 of a LCVR that comprises the amino acid sequence set forth in SEQ ID NO: 402 (or a variant thereof); (20) a HCVR comprising the HCDR1, HCDR2 and HCDR3 of a HCVR that comprises the amino acid sequence set forth in SEQ ID NO: 407 (or a variant thereof); and a LCVR comprising the LCDR1, LCDR2 and LCDR3 of a LCVR that comprises the amino acid sequence set forth in SEQ ID NO: 412 (or a variant thereof); (21) a HCVR comprising the HCDR1, HCDR2 and HCDR3 of a HCVR that comprises the amino acid sequence set forth in SEQ ID NO: 417 (or a variant thereof); and a LCVR comprising the LCDR1, LCDR2 and LCDR3 of a LCVR that comprises the amino acid sequence set forth in SEQ ID NO: 422 (or a variant thereof); (22) a HCVR comprising the HCDR1, HCDR2 and HCDR3 of a HCVR that comprises the amino acid sequence set forth in SEQ ID NO: 427 (or a variant thereof); and a LCVR comprising the LCDR1, LCDR2 and LCDR3 of a LCVR that comprises the amino acid sequence set forth in SEQ ID NO: 432 (or a variant thereof); (23) a HCVR comprising the HCDR1, HCDR2 and HCDR3 of a HCVR that comprises the amino acid sequence set forth in SEQ ID NO: 437 (or a variant thereof); and a LCVR comprising the LCDR1, LCDR2 and LCDR3 of a LCVR that comprises the amino acid sequence set forth in SEQ ID NO: 442 (or a variant thereof); (24) a HCVR comprising the HCDR1, HCDR2 and HCDR3 of a HCVR that comprises the amino acid sequence set forth in SEQ ID NO: 447 (or a variant thereof); and a LCVR comprising the LCDR1, LCDR2 and LCDR3 of a LCVR that comprises the amino acid sequence set forth in SEQ ID NO: 452 (or a variant thereof); (25) a HCVR comprising the HCDR1, HCDR2 and HCDR3 of a HCVR that comprises the amino acid sequence set forth in SEQ ID NO: 457 (or a variant thereof); and a LCVR comprising the LCDR1, LCDR2 and LCDR3 of a LCVR that comprises the amino acid sequence set forth in SEQ ID NO: 462 (or a variant thereof); (26) a HCVR comprising the HCDR1, HCDR2 and HCDR3 of a HCVR that comprises the amino acid sequence set forth in SEQ ID NO: 467 (or a variant thereof); and a LCVR comprising the LCDR1, LCDR2 and LCDR3 of a LCVR that comprises the amino acid sequence set forth in SEQ ID NO: 472 (or a variant thereof); (27) a HCVR comprising the HCDR1, HCDR2 and HCDR3 of a HCVR that comprises the amino acid sequence set forth in SEQ ID NO: 477 (or a variant thereof); and a LCVR comprising the LCDR1, LCDR2 and LCDR3 of a LCVR that comprises the amino acid sequence set forth in SEQ ID NO: 482 (or a variant thereof); (28) a HCVR comprising the HCDR1, HCDR2 and HCDR3 of a HCVR that comprises the amino acid sequence set forth in SEQ ID NO: 487 (or a variant thereof); and a LCVR comprising the LCDR1, LCDR2 and LCDR3 of a LCVR that comprises the amino acid sequence set forth in SEQ ID NO: 492 (or a variant thereof); (29) a HCVR comprising the HCDR1, HCDR2 and HCDR3 of a HCVR that comprises the amino acid sequence set forth in SEQ ID NO: 497 (or a variant thereof); and a LCVR comprising the LCDR1, LCDR2 and LCDR3 of a LCVR that comprises the amino acid sequence set forth in SEQ ID NO: 502 (or a variant thereof); (30) a HCVR comprising the HCDR1, HCDR2 and HCDR3 of a HCVR that comprises the amino acid sequence set forth in SEQ ID NO: 507 (or a variant thereof); and a LCVR comprising the LCDR1, LCDR2 and LCDR3 of a LCVR that comprises the amino acid sequence set forth in SEQ ID NO: 512 (or a variant thereof); (31) a HCVR comprising the HCDR1, HCDR2 and HCDR3 of a HCVR that comprises the amino acid sequence set forth in SEQ ID NO: 517 (or a variant thereof); and a LCVR comprising the LCDR1, LCDR2 and LCDR3 of a LCVR that comprises the amino acid sequence set forth in SEQ ID NO: 522 (or a variant thereof); or (32) a HCVR comprising the HCDR1, HCDR2 and HCDR3 of a HCVR that comprises the amino acid sequence set forth in SEQ ID NO: 527 (or a variant thereof); and a LCVR comprising the LCDR1, LCDR2 and LCDR3 of a LCVR that comprises the amino acid sequence set forth in SEQ ID NO: 532 (or a variant thereof). A variant refers to a polypeptide comprising an amino acid sequence that is at least about 70-99.9% (e.g., 70, 72, 74, 75, 76, 79, 80, 81, 82, 83, 84, 85, 86, 87, 88, 89, 90, 91, 92, 93, 94, 95, 96, 97, 98, 99, 99.5, 99.9%) identical or similar to a referenced amino acid sequence that is set forth herein.

[0345] In another example, the anti-TfR scFv can comprise: (a) a HCVR that comprises: an HCDR1 comprising the amino acid sequence set forth in SEQ ID NO: 218 (or a variant thereof), an HCDR2 comprising the amino acid sequence set forth in SEQ ID NO: 219 (or a variant thereof), and an HCDR3 comprising the amino acid sequence set forth in SEQ ID NO: 220 (or a variant thereof); and a LCVR that comprises: an LCDR1 comprising the amino acid sequence set forth in SEQ ID NO: 223 (or a variant thereof), an LCDR2 comprising the amino acid sequence set forth in SEQ ID NO: 224 (or a variant thereof), and an LCDR3 comprising the amino acid sequence set forth in SEQ ID NO: 225 (or a variant thereof); (b) a HCVR that comprises: an HCDR1 comprising the amino acid sequence set forth in SEQ ID NO: 228 (or a variant thereof), an HCDR2 comprising the amino acid sequence set forth in SEQ ID NO: 229 (or a variant thereof), and an HCDR3 comprising the amino acid sequence set forth in SEQ ID NO: 230 (or a variant thereof); and a LCVR that comprises: an LCDR1 comprising the amino acid sequence set forth in SEQ ID NO: 233 (or a variant thereof), an LCDR2 comprising the amino acid sequence set forth in SEQ ID NO: 234 (or a variant thereof), and an LCDR3 comprising the amino acid sequence set forth in SEQ ID NO: 235 (or a variant thereof); (c) a HCVR that comprises: an HCDR1 comprising the amino acid sequence set forth in SEQ ID NO: 238 (or a variant thereof), an HCDR2 comprising the amino acid sequence set forth in SEQ ID NO: 239 (or a variant thereof), and an HCDR3 comprising the amino acid sequence set forth in SEQ ID NO: 240 (or a variant thereof); and a LCVR that comprises: an LCDR1 comprising the amino acid sequence set forth in SEQ ID NO: 243 (or a variant thereof), an LCDR2 comprising the amino acid sequence set forth in SEQ ID NO: 244 (or a variant thereof), and an LCDR3 comprising the amino acid sequence set forth in SEQ ID NO: 245 (or a variant thereof); (d) a HCVR that comprises: an HCDR1 comprising the amino acid sequence set forth in SEQ ID NO: 248 (or a variant thereof), an HCDR2 comprising the amino acid sequence set forth in SEQ ID NO: 249 (or a variant thereof), and an HCDR3 comprising the amino acid sequence set forth in SEQ ID NO: 250 (or a variant thereof); and a LCVR that comprises: an LCDR1 comprising the amino acid sequence set forth in SEQ ID NO: 253 (or a variant thereof), an LCDR2 comprising the amino acid sequence set forth in SEQ ID NO: 254 (or a variant thereof), and an LCDR3 comprising the amino acid sequence set forth in SEQ ID NO: 255 (or a variant thereof); (e) a HCVR that comprises: an HCDR1 comprising the amino acid sequence set forth in SEQ ID NO: 258 (or a variant thereof), an HCDR2 comprising the amino acid sequence set forth in SEQ ID NO: 259 (or a variant thereof), and an HCDR3 comprising the amino acid sequence set forth in SEQ ID NO: 260 (or a variant thereof); and a LCVR that comprises: an LCDR1 comprising the amino acid sequence set forth in SEQ ID NO: 263 (or a variant thereof), an LCDR2 comprising the amino acid sequence set forth in SEQ ID NO: 264 (or a variant thereof), and an LCDR3 comprising the amino acid sequence set forth in SEQ ID NO: 265 (or a variant thereof); (f) a HCVR that comprises: an HCDR1 comprising the amino acid sequence set forth in SEQ ID NO: 268 (or a variant thereof), an HCDR2 comprising the amino acid sequence set forth in SEQ ID NO: 269 (or a variant thereof), and an HCDR3 comprising the amino acid sequence set forth in SEQ ID NO: 270 (or a variant thereof); and a LCVR that comprises: an LCDR1 comprising the amino acid sequence set forth in SEQ ID NO: 273 (or a variant thereof), an LCDR2 comprising the amino acid sequence set forth in SEQ ID NO: 274 (or a variant thereof), and an LCDR3 comprising the amino acid sequence set forth in SEQ ID NO: 275 (or a variant thereof); (g) a HCVR that comprises: an HCDR1 comprising the amino acid sequence set forth in SEQ ID NO: 278 (or a variant thereof), an HCDR2 comprising the amino acid sequence set forth in SEQ ID NO: 279 (or a variant thereof), and an HCDR3 comprising the amino acid sequence set forth in SEQ ID NO: 280 (or a variant thereof); and a LCVR that comprises: an LCDR1 comprising the amino acid sequence set forth in SEQ ID NO: 283 (or a variant thereof), an LCDR2 comprising the amino acid sequence set forth in SEQ ID NO: 284 (or a variant thereof), and an LCDR3 comprising the amino acid sequence set forth in SEQ ID NO: 285 (or a variant thereof); (h) a HCVR that comprises: an HCDR1 comprising the amino acid sequence set forth in SEQ ID NO: 288 (or a variant thereof), an HCDR2 comprising the amino acid sequence set forth in SEQ ID NO: 289 (or a variant thereof), and an HCDR3 comprising the amino acid sequence set forth in SEQ ID NO: 290 (or a variant thereof); and a LCVR that comprises: an LCDR1 comprising the amino acid sequence set forth in SEQ ID NO: 293 (or a variant thereof), an LCDR2 comprising the amino acid sequence set forth in SEQ ID NO: 294 (or a variant thereof), and an LCDR3 comprising the amino acid sequence set forth in SEQ ID NO: 295 (or a variant thereof); (i) a HCVR that comprises: an HCDR1 comprising the amino acid sequence set forth in SEQ ID NO: 298 (or a variant thereof), an HCDR2 comprising the amino acid sequence set forth in SEQ ID NO: 299 (or a variant thereof), and an HCDR3 comprising the amino acid sequence set forth in SEQ ID NO: 300 (or a variant thereof); and a LCVR that comprises: an LCDR1 comprising the amino acid sequence set forth in SEQ ID NO: 303 (or a variant thereof), an LCDR2 comprising the amino acid sequence set forth in SEQ ID NO: 304 (or a variant thereof), and an LCDR3 comprising the amino acid sequence set forth in SEQ ID NO: 305 (or a variant thereof); (j) a HCVR that comprises: an HCDR1 comprising the amino acid sequence set forth in SEQ ID NO: 308 (or a variant thereof), an HCDR2 comprising the amino acid sequence set forth in SEQ ID NO: 309 (or a variant thereof), and an HCDR3 comprising the amino acid sequence set forth in SEQ ID NO: 310 (or a variant thereof); and a LCVR that comprises: an LCDR1 comprising the amino acid sequence set forth in SEQ ID NO: 313 (or a variant thereof), an LCDR2 comprising the amino acid sequence set forth in SEQ ID NO: 314 (or a variant thereof), and an LCDR3 comprising the amino acid sequence set forth in SEQ ID NO: 315 (or a variant thereof); (k) a HCVR that comprises: an HCDR1 comprising the amino acid sequence set forth in SEQ ID NO: 318 (or a variant thereof), an HCDR2 comprising the amino acid sequence set forth in SEQ ID NO: 319 (or a variant thereof), and an HCDR3 comprising the amino acid sequence set forth in SEQ ID NO: 320 (or a variant thereof); and a LCVR that comprises: an LCDR1 comprising the amino acid sequence set forth in SEQ ID NO: 323 (or a variant thereof), an LCDR2 comprising the amino acid sequence set forth in SEQ ID NO: 324 (or a variant thereof), and an LCDR3 comprising the amino acid sequence set forth in SEQ ID NO: 325 (or a variant thereof); (1) a HCVR that comprises: an HCDR1 comprising the amino acid sequence set forth in SEQ ID NO: 328 (or a variant thereof), an HCDR2 comprising the amino acid sequence set forth in SEQ ID NO: 329 (or a variant thereof), and an HCDR3 comprising the amino acid sequence set forth in SEQ ID NO: 330 (or a variant thereof); and a LCVR that comprises: an LCDR1 comprising the amino acid sequence set forth in SEQ ID NO: 333 (or a variant thereof), an LCDR2 comprising the amino acid sequence set forth in SEQ ID NO: 334 (or a variant thereof), and an LCDR3 comprising the amino acid sequence set forth in SEQ ID NO: 335 (or a variant thereof); (m) a HCVR that comprises: an HCDR1 comprising the amino acid sequence set forth in SEQ ID NO: 338 (or a variant thereof), an HCDR2 comprising the amino acid sequence set forth in SEQ ID NO: 339 (or a variant thereof), and an HCDR3 comprising the amino acid sequence set forth in SEQ ID NO: 340 (or a variant thereof); and a LCVR that comprises: an LCDR1 comprising the amino acid sequence set forth in SEQ ID NO: 343 (or a variant thereof), an LCDR2 comprising the amino acid sequence set forth in SEQ ID NO: 344 (or a variant thereof), and an LCDR3 comprising the amino acid sequence set forth in SEQ ID NO: 345 (or a variant thereof); (n) a HCVR that comprises: an HCDR1 comprising the amino acid sequence set forth in SEQ ID NO: 348 (or a variant thereof), an HCDR2 comprising the amino acid sequence set forth in SEQ ID NO: 349 (or a variant thereof), and an HCDR3 comprising the amino acid sequence set forth in SEQ ID NO: 350 (or a variant thereof); and a LCVR that comprises: an LCDR1 comprising the amino acid sequence set forth in SEQ ID NO: 353 (or a variant thereof), an LCDR2 comprising the amino acid sequence set forth in SEQ ID NO: 354 (or a variant thereof), and an LCDR3 comprising the amino acid sequence set forth in SEQ ID NO: 355 (or a variant thereof); (o) a HCVR that comprises: an HCDR1 comprising the amino acid sequence set forth in SEQ ID NO: 358 (or a variant thereof), an HCDR2 comprising the amino acid sequence set forth in SEQ ID NO: 359 (or a variant thereof), and an HCDR3 comprising the amino acid sequence set forth in SEQ ID NO: 360 (or a variant thereof); and a LCVR that comprises: an LCDR1 comprising the amino acid sequence set forth in SEQ ID NO: 363 (or a variant thereof), an LCDR2 comprising the amino acid sequence set forth in SEQ ID NO: 364 (or a variant thereof), and an LCDR3 comprising the amino acid sequence set forth in SEQ ID NO: 365 (or a variant thereof); (p) a HCVR that comprises: an HCDR1 comprising the amino acid sequence set forth in SEQ ID NO: 368 (or a variant thereof), an HCDR2 comprising the amino acid sequence set forth in SEQ ID NO: 369 (or a variant thereof), and an HCDR3 comprising the amino acid sequence set forth in SEQ ID NO: 370 (or a variant thereof); and a LCVR that comprises: an LCDR1 comprising the amino acid sequence set forth in SEQ ID NO: 373 (or a variant thereof), an LCDR2 comprising the amino acid sequence set forth in SEQ ID NO: 374 (or a variant thereof), and an LCDR3 comprising the amino acid sequence set forth in SEQ ID NO: 375 (or a variant thereof); (q) a HCVR that comprises: an HCDR1 comprising the amino acid sequence set forth in SEQ ID NO: 378 (or a variant thereof), an HCDR2 comprising the amino acid sequence set forth in SEQ ID NO: 379 (or a variant thereof), and an HCDR3 comprising the amino acid sequence set forth in SEQ ID NO: 380 (or a variant thereof); and a LCVR that comprises: an LCDR1 comprising the amino acid sequence set forth in SEQ ID NO: 383 (or a variant thereof), an LCDR2 comprising the amino acid sequence set forth in SEQ ID NO: 384 (or a variant thereof), and an LCDR3 comprising the amino acid sequence set forth in SEQ ID NO: 385 (or a variant thereof); (r) a HCVR that comprises: an HCDR1 comprising the amino acid sequence set forth in SEQ ID NO: 388 (or a variant thereof), an HCDR2 comprising the amino acid sequence set forth in SEQ ID NO: 389 (or a variant thereof), and an HCDR3 comprising the amino acid sequence set forth in SEQ ID NO: 390 (or a variant thereof); and a LCVR that comprises: an LCDR1 comprising the amino acid sequence set forth in SEQ ID NO: 393 (or a variant thereof), an LCDR2 comprising the amino acid sequence set forth in SEQ ID NO: 394 (or a variant thereof), and an LCDR3 comprising the amino acid sequence set forth in SEQ ID NO: 395 (or a variant thereof); (s) a HCVR that comprises: an HCDR1 comprising the amino acid sequence set forth in SEQ ID NO: 398 (or a variant thereof), an HCDR2 comprising the amino acid sequence set forth in SEQ ID NO: 399 (or a variant thereof), and an HCDR3 comprising the amino acid sequence set forth in SEQ ID NO: 400 (or a variant thereof); and a LCVR that comprises: an LCDR1 comprising the amino acid sequence set forth in SEQ ID NO: 403 (or a variant thereof), an LCDR2 comprising the amino acid sequence set forth in SEQ ID NO: 404 (or a variant thereof), and an LCDR3 comprising the amino acid sequence set forth in SEQ ID NO: 405 (or a variant thereof); (t) a HCVR that comprises: an HCDR1 comprising the amino acid sequence set forth in SEQ ID NO: 408 (or a variant thereof), an HCDR2 comprising the amino acid sequence set forth in SEQ ID NO: 409 (or a variant thereof), and an HCDR3 comprising the amino acid sequence set forth in SEQ ID NO: 410 (or a variant thereof); and a LCVR that comprises: an LCDR1 comprising the amino acid sequence set forth in SEQ ID NO: 413 (or a variant thereof), an LCDR2 comprising the amino acid sequence set forth in SEQ ID NO: 414 (or a variant thereof), and an LCDR3 comprising the amino acid sequence set forth in SEQ ID NO: 415 (or a variant thereof); (u) a HCVR that comprises: an HCDR1 comprising the amino acid sequence set forth in SEQ ID NO: 418 (or a variant thereof), an HCDR2 comprising the amino acid sequence set forth in SEQ ID NO: 419 (or a variant thereof), and an HCDR3 comprising the amino acid sequence set forth in SEQ ID NO: 420 (or a variant thereof); and a LCVR that comprises: an LCDR1 comprising the amino acid sequence set forth in SEQ ID NO: 423 (or a variant thereof), an LCDR2 comprising the amino acid sequence set forth in SEQ ID NO: 424 (or a variant thereof), and an LCDR3 comprising the amino acid sequence set forth in SEQ ID NO: 425 (or a variant thereof); (v) a HCVR that comprises: an HCDR1 comprising the amino acid sequence set forth in SEQ ID NO: 428 (or a variant thereof), an HCDR2 comprising the amino acid sequence set forth in SEQ ID NO: 429 (or a variant thereof), and an HCDR3 comprising the amino acid sequence set forth in SEQ ID NO: 430 (or a variant thereof); and a LCVR that comprises: an LCDR1 comprising the amino acid sequence set forth in SEQ ID NO: 433 (or a variant thereof), an LCDR2 comprising the amino acid sequence set forth in SEQ ID NO: 434 (or a variant thereof), and an LCDR3 comprising the amino acid sequence set forth in SEQ ID NO: 435 (or a variant thereof); (w) a HCVR that comprises: an HCDR1 comprising the amino acid sequence set forth in SEQ ID NO: 438 (or a variant thereof), an HCDR2 comprising the amino acid sequence set forth in SEQ ID NO: 439 (or a variant thereof), and an HCDR3 comprising the amino acid sequence set forth in SEQ ID NO: 440 (or a variant thereof); and a LCVR that comprises: an LCDR1 comprising the amino acid sequence set forth in SEQ ID NO: 443 (or a variant thereof), an LCDR2 comprising the amino acid sequence set forth in SEQ ID NO: 444 (or a variant thereof), and an LCDR3 comprising the amino acid sequence set forth in SEQ ID NO: 445 (or a variant thereof); (x) a HCVR that comprises: an HCDR1 comprising the amino acid sequence set forth in SEQ ID NO: 448 (or a variant thereof), an HCDR2 comprising the amino acid sequence set forth in SEQ ID NO: 449 (or a variant thereof), and an HCDR3 comprising the amino acid sequence set forth in SEQ ID NO: 450 (or a variant thereof); and a LCVR that comprises: an LCDR1 comprising the amino acid sequence set forth in SEQ ID NO: 453 (or a variant thereof), an LCDR2 comprising the amino acid sequence set forth in SEQ ID NO: 454 (or a variant thereof), and an LCDR3 comprising the amino acid sequence set forth in SEQ ID NO: 455 (or a variant thereof); (y) a HCVR that comprises: an HCDR1 comprising the amino acid sequence set forth in SEQ ID NO: 458 (or a variant thereof), an HCDR2 comprising the amino acid sequence set forth in SEQ ID NO: 459 (or a variant thereof), and an HCDR3 comprising the amino acid sequence set forth in SEQ ID NO: 460 (or a variant thereof); and a LCVR that comprises: an LCDR1 comprising the amino acid sequence set forth in SEQ ID NO: 463 (or a variant thereof), an LCDR2 comprising the amino acid sequence set forth in SEQ ID NO: 464 (or a variant thereof), and an LCDR3 comprising the amino acid sequence set forth in SEQ ID NO: 465 (or a variant thereof); (z) a HCVR that comprises: an HCDR1 comprising the amino acid sequence set forth in SEQ ID NO: 468 (or a variant thereof), an HCDR2 comprising the amino acid sequence set forth in SEQ ID NO: 469 (or a variant thereof), and an HCDR3 comprising the amino acid sequence set forth in SEQ ID NO: 470 (or a variant thereof); and a LCVR that comprises: an LCDR1 comprising the amino acid sequence set forth in SEQ ID NO: 473 (or a variant thereof), an LCDR2 comprising the amino acid sequence set forth in SEQ ID NO: 474 (or a variant thereof), and an LCDR3 comprising the amino acid sequence set forth in SEQ ID NO: 475 (or a variant thereof); (aa) a HCVR that comprises: an HCDR1 comprising the amino acid sequence set forth in SEQ ID NO: 478 (or a variant thereof), an HCDR2 comprising the amino acid sequence set forth in SEQ ID NO: 479 (or a variant thereof), and an HCDR3 comprising the amino acid sequence set forth in SEQ ID NO: 480 (or a variant thereof); and a LCVR that comprises: an LCDR1 comprising the amino acid sequence set forth in SEQ ID NO: 483 (or a variant thereof), an LCDR2 comprising the amino acid sequence set forth in SEQ ID NO: 484 (or a variant thereof), and an LCDR3 comprising the amino acid sequence set forth in SEQ ID NO: 485 (or a variant thereof); (ab) a HCVR that comprises: an HCDR1 comprising the amino acid sequence set forth in SEQ ID NO: 488 (or a variant thereof), an HCDR2 comprising the amino acid sequence set forth in SEQ ID NO: 489 (or a variant thereof), and an HCDR3 comprising the amino acid sequence set forth in SEQ ID NO: 490 (or a variant thereof); and a LCVR that comprises: an LCDR1 comprising the amino acid sequence set forth in SEQ ID NO: 493 (or a variant thereof), an LCDR2 comprising the amino acid sequence set forth in SEQ ID NO: 494 (or a variant thereof), and an LCDR3 comprising the amino acid sequence set forth in SEQ ID NO: 495 (or a variant thereof); (ac) a HCVR that comprises: an HCDR1 comprising the amino acid sequence set forth in SEQ ID NO: 498 (or a variant thereof), an HCDR2 comprising the amino acid sequence set forth in SEQ ID NO: 499 (or a variant thereof), and an HCDR3 comprising the amino acid sequence set forth in SEQ ID NO: 500 (or a variant thereof); and a LCVR that comprises: an LCDR1 comprising the amino acid sequence set forth in SEQ ID NO: 503 (or a variant thereof), an LCDR2 comprising the amino acid sequence set forth in SEQ ID NO: 504 (or a variant thereof), and an LCDR3 comprising the amino acid sequence set forth in SEQ ID NO: 505 (or a variant thereof); (ad) a HCVR that comprises: an HCDR1 comprising the amino acid sequence set forth in SEQ ID NO: 508 (or a variant thereof), an HCDR2 comprising the amino acid sequence set forth in SEQ ID NO: 509 (or a variant thereof), and an HCDR3 comprising the amino acid sequence set forth in SEQ ID NO: 510 (or a variant thereof); and a LCVR that comprises: an LCDR1 comprising the amino acid sequence set forth in SEQ ID NO: 513 (or a variant thereof), an LCDR2 comprising the amino acid sequence set forth in SEQ ID NO: 514 (or a variant thereof), and an LCDR3 comprising the amino acid sequence set forth in SEQ ID NO: 515 (or a variant thereof); (ae) a HCVR that comprises: an HCDR1 comprising the amino acid sequence set forth in SEQ ID NO: 518 (or a variant thereof), an HCDR2 comprising the amino acid sequence set forth in SEQ ID NO: 519 (or a variant thereof), and an HCDR3 comprising the amino acid sequence set forth in SEQ ID NO: 520 (or a variant thereof); and a LCVR that comprises: an LCDR1 comprising the amino acid sequence set forth in SEQ ID NO: 523 (or a variant thereof), an LCDR2 comprising the amino acid sequence set forth in SEQ ID NO: 524 (or a variant thereof), and an LCDR3 comprising the amino acid sequence set forth in SEQ ID NO: 525 (or a variant thereof); and/or (af) a HCVR that comprises: an HCDR1 comprising the amino acid sequence set forth in SEQ ID NO: 528 (or a variant thereof), an HCDR2 comprising the amino acid sequence set forth in SEQ ID NO: 529 (or a variant thereof), and an HCDR3 comprising the amino acid sequence set forth in SEQ ID NO: 530 (or a variant thereof); and a LCVR that comprises: an LCDR1 comprising the amino acid sequence set forth in SEQ ID NO: 533 (or a variant thereof), an LCDR2 comprising the amino acid sequence set forth in SEQ ID NO: 534 (or a variant thereof), and an LCDR3 comprising the amino acid sequence set forth in SEQ ID NO: 535 (or a variant thereof). A variant refers to a polypeptide comprising an amino acid sequence that is at least about 70-99.9% (e.g., 70, 72, 74, 75, 76, 79, 80, 81, 82, 83, 84, 85, 86, 87, 88, 89, 90, 91, 92, 93, 94, 95, 96, 97, 98, 99, 99.5, 99.9%) identical or similar to a referenced amino acid sequence that is set forth herein.

[0346] In another example, the anti-TfR scFv can comprise: (i) a HCVR that comprises the amino acid sequence set forth in SEQ ID NO: 217 (or a variant thereof); and a LCVR that comprises the amino acid sequence set forth in SEQ ID NO: 222 (or a variant thereof); (ii) a HCVR that comprises the amino acid sequence set forth in SEQ ID NO: 227 (or a variant thereof); and a LCVR that comprises the amino acid sequence set forth in SEQ ID NO: 232 (or a variant thereof); (iii) a HCVR that comprises the amino acid sequence set forth in SEQ ID NO: 237 (or a variant thereof); and a LCVR that comprises the amino acid sequence set forth in SEQ ID NO: 242 (or a variant thereof); (iv) a HCVR that comprises the amino acid sequence set forth in SEQ ID NO: 247 (or a variant thereof); and a LCVR that comprises the amino acid sequence set forth in SEQ ID NO: 252 (or a variant thereof); (v) a HCVR that comprises the amino acid sequence set forth in SEQ ID NO: 257 (or a variant thereof); and a LCVR that comprises the amino acid sequence set forth in SEQ ID NO: 262 (or a variant thereof); (vi) a HCVR that comprises the amino acid sequence set forth in SEQ ID NO: 267 (or a variant thereof); and a LCVR that comprises the amino acid sequence set forth in SEQ ID NO: 272 (or a variant thereof); (vii) a HCVR that comprises the amino acid sequence set forth in SEQ ID NO: 277 (or a variant thereof); and a LCVR that comprises the amino acid sequence set forth in SEQ ID NO: 282 (or a variant thereof); (viii) a HCVR that comprises the amino acid sequence set forth in SEQ ID NO: 287 (or a variant thereof); and a LCVR that comprises the amino acid sequence set forth in SEQ ID NO: 292 (or a variant thereof); (ix) a HCVR that comprises the amino acid sequence set forth in SEQ ID NO: 297 (or a variant thereof); and a LCVR that comprises the amino acid sequence set forth in SEQ ID NO: 302 (or a variant thereof); (x) a HCVR that comprises the amino acid sequence set forth in SEQ ID NO: 307 (or a variant thereof); and a LCVR that comprises the amino acid sequence set forth in SEQ ID NO: 312 (or a variant thereof); (xi) a HCVR that comprises the amino acid sequence set forth in SEQ ID NO: 317 (or a variant thereof); and a LCVR that comprises the amino acid sequence set forth in SEQ ID NO: 322 (or a variant thereof); (xii) a HCVR that comprises the amino acid sequence set forth in SEQ ID NO: 327 (or a variant thereof); and a LCVR that comprises the amino acid sequence set forth in SEQ ID NO: 332 (or a variant thereof); (xiii) a HCVR that comprises the amino acid sequence set forth in SEQ ID NO: 337 (or a variant thereof); and a LCVR that comprises the amino acid sequence set forth in SEQ ID NO: 342 (or a variant thereof); (xiv) a HCVR that comprises the amino acid sequence set forth in SEQ ID NO: 347 (or a variant thereof); and a LCVR that comprises the amino acid sequence set forth in SEQ ID NO: 352 (or a variant thereof); (xv) a HCVR that comprises the amino acid sequence set forth in SEQ ID NO: 357 (or a variant thereof); and a LCVR that comprises the amino acid sequence set forth in SEQ ID NO: 362 (or a variant thereof); (xvi) a HCVR that comprises the amino acid sequence set forth in SEQ ID NO: 367 (or a variant thereof); and a LCVR that comprises the amino acid sequence set forth in SEQ ID NO: 372 (or a variant thereof); (xvii) a HCVR that comprises the amino acid sequence set forth in SEQ ID NO: 377 (or a variant thereof); and a LCVR that comprises the amino acid sequence set forth in SEQ ID NO: 382 (or a variant thereof); (xviii) a HCVR that comprises the amino acid sequence set forth in SEQ ID NO: 387 (or a variant thereof); and a LCVR that comprises the amino acid sequence set forth in SEQ ID NO: 392 (or a variant thereof); (xix) a HCVR that comprises the amino acid sequence set forth in SEQ ID NO: 397 (or a variant thereof); and a LCVR that comprises the amino acid sequence set forth in SEQ ID NO: 402 (or a variant thereof); (xx) a HCVR that comprises the amino acid sequence set forth in SEQ ID NO: 407 (or a variant thereof); and a LCVR that comprises the amino acid sequence set forth in SEQ ID NO: 412 (or a variant thereof); (xxi) a HCVR that comprises the amino acid sequence set forth in SEQ ID NO: 417 (or a variant thereof); and a LCVR that comprises the amino acid sequence set forth in SEQ ID NO: 422 (or a variant thereof); (xxii) a HCVR that comprises the amino acid sequence set forth in SEQ ID NO: 427 (or a variant thereof); and a LCVR that comprises the amino acid sequence set forth in SEQ ID NO: 432 (or a variant thereof); (xxiii) a HCVR that comprises the amino acid sequence set forth in SEQ ID NO: 437 (or a variant thereof); and a LCVR that comprises the amino acid sequence set forth in SEQ ID NO: 442 (or a variant thereof); (xxiv) a HCVR that comprises the amino acid sequence set forth in SEQ ID NO: 447 (or a variant thereof); and a LCVR that comprises the amino acid sequence set forth in SEQ ID NO: 452 (or a variant thereof); (xxv) a HCVR that comprises the amino acid sequence set forth in SEQ ID NO: 457 (or a variant thereof); and a LCVR that comprises the amino acid sequence set forth in SEQ ID NO: 462 (or a variant thereof); (xxvi) a HCVR that comprises the amino acid sequence set forth in SEQ ID NO: 467 (or a variant thereof); and a LCVR that comprises the amino acid sequence set forth in SEQ ID NO: 472 (or a variant thereof); (xxvii) a HCVR that comprises the amino acid sequence set forth in SEQ ID NO: 477 (or a variant thereof); and a LCVR that comprises the amino acid sequence set forth in SEQ ID NO: 482 (or a variant thereof); (xxviii) a HCVR that comprises the amino acid sequence set forth in SEQ ID NO: 487 (or a variant thereof); and a LCVR that comprises the amino acid sequence set forth in SEQ ID NO: 492 (or a variant thereof); (xxix) a HCVR that comprises the amino acid sequence set forth in SEQ ID NO: 497 (or a variant thereof); and a LCVR that comprises the amino acid sequence set forth in SEQ ID NO: 502 (or a variant thereof); (xxx) a HCVR that comprises the amino acid sequence set forth in SEQ ID NO: 507 (or a variant thereof); and a LCVR that comprises the amino acid sequence set forth in SEQ ID NO: 512 (or a variant thereof); (xxxi) a HCVR that comprises the amino acid sequence set forth in SEQ ID NO: 517 (or a variant thereof); and a LCVR that comprises the amino acid sequence set forth in SEQ ID NO: 522 (or a variant thereof); and/or (xxxii) a HCVR that comprises the amino acid sequence set forth in SEQ ID NO: 527 (or a variant thereof); and a LCVR that comprises the amino acid sequence set forth in SEQ ID NO: 532 (or a variant thereof), optionally wherein the HCVR and LCVR are linked by a linker (e.g., that comprises an amino acid sequence, e.g., about 10 amino acids in length, for example, 1, 2, 3, 4, 5, 6, 7, 8, 8, or 10 repeats of Gly₄Ser (SEQ ID NO: 600). A variant refers to a polypeptide comprising an amino acid sequence that is at least about 70-99.9% (e.g., 70, 72, 74, 75, 76, 79, 80, 81, 82, 83, 84, 85, 86, 87, 88, 89, 90, 91, 92, 93, 94, 95, 96, 97, 98, 99, 99.5, 99.9%) identical or similar to a referenced amino acid sequence that is set forth herein.

[0347] Examples of polynucleotides encoding anti-TfR scFvs are provided in Table 29 and include: (1) a polynucleotide encoding a HCVR that comprises the nucleotide sequence set forth in SEQ ID NO: 216, and a LCVR that comprises the nucleotide sequence set forth in SEQ ID NO: 221; (2) a polynucleotide encoding a HCVR that comprises the nucleotide sequence set forth in SEQ ID NO: 226, and a LCVR that comprises the nucleotide sequence set forth in SEQ ID NO: 231; (3) a polynucleotide encoding a HCVR that comprises the nucleotide sequence set forth in SEQ ID NO: 236, and a LCVR that comprises the nucleotide sequence set forth in SEQ ID NO: 241; (4) a polynucleotide encoding a HCVR that comprises the nucleotide sequence set forth in SEQ ID NO: 246, and a LCVR that comprises the nucleotide sequence set forth in SEQ ID NO: 251; (5) a polynucleotide encoding a HCVR that comprises the nucleotide sequence set forth in SEQ ID NO: 256, and a LCVR that comprises the nucleotide sequence set forth in SEQ ID NO: 261; (6) a polynucleotide encoding a HCVR that comprises the nucleotide sequence set forth in SEQ ID NO: 266, and a LCVR that comprises the nucleotide sequence set forth in SEQ ID NO: 271; (7) a polynucleotide encoding a HCVR that comprises the nucleotide sequence set forth in SEQ ID NO: 276, and a LCVR that comprises the nucleotide sequence set forth in SEQ ID NO: 281; (8) a polynucleotide encoding a HCVR that comprises the nucleotide sequence set forth in SEQ ID NO: 286, and a LCVR that comprises the nucleotide sequence set forth in SEQ ID NO: 291; (9) a polynucleotide encoding a HCVR that comprises the nucleotide sequence set forth in SEQ ID NO: 296, and a LCVR that comprises the nucleotide sequence set forth in SEQ ID NO: 301; (10) a polynucleotide encoding a HCVR that comprises the nucleotide sequence set forth in SEQ ID NO: 306, and a LCVR that comprises the nucleotide sequence set forth in SEQ ID NO: 311; (11) a polynucleotide encoding a HCVR that comprises the nucleotide sequence set forth in SEQ ID NO: 316, and a LCVR that comprises the nucleotide sequence set forth in SEQ ID NO: 321; (12) a polynucleotide encoding a HCVR that comprises the nucleotide sequence set forth in SEQ ID NO: 326, and a LCVR that comprises the nucleotide sequence set forth in SEQ ID NO: 331; (13) a polynucleotide encoding a HCVR that comprises the nucleotide sequence set forth in SEQ ID NO: 336, and a LCVR that comprises the nucleotide sequence set forth in SEQ ID NO: 341; (14) a polynucleotide encoding a HCVR that comprises the nucleotide sequence set forth in SEQ ID NO: 346, and a LCVR that comprises the nucleotide sequence set forth in SEQ ID NO: 351; (15) a polynucleotide encoding a HCVR that comprises the nucleotide sequence set forth in SEQ ID NO: 356, and a LCVR that comprises the nucleotide sequence set forth in SEQ ID NO: 361; (16) a polynucleotide encoding a HCVR that comprises the nucleotide sequence set forth in SEQ ID NO: 366, and a LCVR that comprises the nucleotide sequence set forth in SEQ ID NO: 371; (17) a polynucleotide encoding a HCVR that comprises the nucleotide sequence set forth in SEQ ID NO: 376, and a LCVR that comprises the nucleotide sequence set forth in SEQ ID NO: 381; (18) a polynucleotide encoding a HCVR that comprises the nucleotide sequence set forth in SEQ ID NO: 386, and a LCVR that comprises the nucleotide sequence set forth in SEQ ID NO: 391; (19) a polynucleotide encoding a HCVR that comprises the nucleotide sequence set forth in SEQ ID NO: 396, and a LCVR that comprises the nucleotide sequence set forth in SEQ ID NO: 401; (20) a polynucleotide encoding a HCVR that comprises the nucleotide sequence set forth in SEQ ID NO: 406, and a LCVR that comprises the nucleotide sequence set forth in SEQ ID NO: 411; (21) a polynucleotide encoding a HCVR that comprises the nucleotide sequence set forth in SEQ ID NO: 416, and a LCVR that comprises the nucleotide sequence set forth in SEQ ID NO: 421; (22) a polynucleotide encoding a HCVR that comprises the nucleotide sequence set forth in SEQ ID NO: 426, and a LCVR that comprises the nucleotide sequence set forth in SEQ ID NO: 431; (23) a polynucleotide encoding a HCVR that comprises the nucleotide sequence set forth in SEQ ID NO: 436, and a LCVR that comprises the nucleotide sequence set forth in SEQ ID NO: 441; (24) a polynucleotide encoding a HCVR that comprises the nucleotide sequence set forth in SEQ ID NO: 446, and a LCVR that comprises the nucleotide sequence set forth in SEQ ID NO: 451; (25) a polynucleotide encoding a HCVR that comprises the nucleotide sequence set forth in SEQ ID NO: 456, and a LCVR that comprises the nucleotide sequence set forth in SEQ ID NO: 461; (26) a polynucleotide encoding a HCVR that comprises the nucleotide sequence set forth in SEQ ID NO: 466, and a LCVR that comprises the nucleotide sequence set forth in SEQ ID NO: 471; (27) a polynucleotide encoding a HCVR that comprises the nucleotide sequence set forth in SEQ ID NO: 476, and a LCVR that comprises the nucleotide sequence set forth in SEQ ID NO: 481; (28) a polynucleotide encoding a HCVR that comprises the nucleotide sequence set forth in SEQ ID NO: 486, and a LCVR that comprises the nucleotide sequence set forth in SEQ ID NO: 491; (29) a polynucleotide encoding a HCVR that comprises the nucleotide sequence set forth in SEQ ID NO: 496, and a LCVR that comprises the nucleotide sequence set forth in SEQ ID NO: 501; (30) a polynucleotide encoding a HCVR that comprises the nucleotide sequence set forth in SEQ ID NO: 506, and a LCVR that comprises the nucleotide sequence set forth in SEQ ID NO: 511; (31) a polynucleotide encoding a HCVR that comprises the nucleotide sequence set forth in SEQ ID NO: 516, and a LCVR that comprises the nucleotide sequence set forth in SEQ ID NO: 521; or (32) a polynucleotide encoding a HCVR that comprises the nucleotide sequence set forth in SEQ ID NO: 526, and a LCVR that comprises the nucleotide sequence set forth in SEQ ID NO: 531, wherein the HCVR and LCVR are in either order.

[0348] In an embodiment, an anti-hTfR scFv, in V_{L}-(Gly₄Ser)₃-V_{H} format (Gly₄Ser = SEQ ID NO: 600), comprises the amino acid sequence set forth in any one of SEQ ID NOS: 538-569. Also contemplated are such fusions that are in the format V_{H}-(Gly₄Ser)₃-V_{L} (Gly₄Ser = SEQ ID NO: 600).

[0349] In another example, the TfR-binding delivery domain can be a Fab fragments (e.g., that binds specifically to human transferrin receptor). Fab fragments typically contain one complete light chain, VL and constant light domain, e.g., kappa (e.g.,

RTVAAPSVFIFPPSDEQLKSGTASVVCLLNNFYPREAKVQWKVDNALQSG
NSQESVTEQDSKDSTYSLSSTLTLSKADYEKHKVYACEVTHQGLSSPVTK
SFNRGEC (SEQ ID NO:601)

) and the V_{H} and IgG1 CH1 portion (e.g.,

ASTKGPSVFPLAPSSKSTSGGTAALGCLVKDYFPEPVTVSWNSGALTSGV
HTFPAVLQSSGLYSLSSVVTVPSSSLGTQTYICNVNHKPSNTKVDKKVEP
KSCDKTH (SEQ ID NO:602)

) or IgG4 CH1 (e.g.,

ASTKGPSVFPLAPCSRSTSESTAALGCLVKDYFPEPVTVSWNSGALTSGV
HTFPAVLQSSGLYSLSSVVTVPSSSLGTKTYTCNVDHKPSNTKVDKRVES
KYGPPLLQGSG (SEQ IDNO: 674)

) of one heavy chain. Fab fragment antibodies can be generated by papain digestion of whole IgG antibodies to remove the entire Fc fragment, including the hinge region. In one example, the Fab protein can comprise: (1) a heavy chain variable region (HCVR) that comprisesthe amino acid sequence set forth in SEQ ID NO: 217, or a heavy chain variable region that includes HCDR1, HCDR2 and HCDR3 of such a HCVR- linked to the CH1 domain-and a light chain variable region (LCVR) that comprises the amino acid sequence set forth in SEQ ID NO: 222, or LCDR1, LCDR2 and LCDR3 of such a LCVR-linked to the CL domain; (2) a heavy chain variable region (HCVR) that comprises the amino acid sequence set forth in SEQ ID NO: 227, or a heavy chain variable region that includes HCDR1, HCDR2 and HCDR3 of such a HCVR- linked to the CH1 domain-and a light chain variable region (LCVR) that comprises the amino acid sequence set forth in SEQ ID NO: 232, or LCDR1, LCDR2 and LCDR3 of such a LCVR-linked to the CL domain; (3) a heavy chain variable region (HCVR) that comprises the amino acid sequence set forth in SEQ ID NO: 237, or a heavy chain variable region that includes HCDR1, HCDR2 and HCDR3 of such a HCVR- linked to the CH1 domain-and a light chain variable region (LCVR) that comprises the amino acid sequence set forth in SEQ ID NO: 242, or LCDR1, LCDR2 and LCDR3 of such a LCVR-linked to the CL domain; (4) a heavy chain variable region (HCVR) that comprises the amino acid sequence set forth in SEQ ID NO: 247, or a heavy chain variable region that includes HCDR1, HCDR2 and HCDR3 of such a HCVR-linked to the CH1 domain-and a light chain variable region (LCVR) that comprises the amino acid sequence set forth in SEQ ID NO: 252, or LCDR1, LCDR2 and LCDR3 of such a LCVR-linked to the CL domain; (5) a heavy chain variable region (HCVR) that comprises the amino acid sequence set forth in SEQ ID NO: 257, or a heavy chain variable region that includes HCDR1, HCDR2 and HCDR3 of such a HCVR- linked to the CH1 domain-and a light chain variable region (LCVR) that comprises the amino acid sequence set forth in SEQ ID NO: 262, or LCDR1, LCDR2 and LCDR3 of such a LCVR-linked to the CL domain; (6) a heavy chain variable region (HCVR) that comprises the amino acid sequence set forth in SEQ ID NO: 267, or a heavy chain variable region that includes HCDR1, HCDR2 and HCDR3 of such a HCVR-linked to the CH1 domain-and a light chain variable region (LCVR) that comprises the amino acid sequence set forth in SEQ ID NO: 272, or LCDR1, LCDR2 and LCDR3 of such a LCVR-linked to the CL domain; (7) a heavy chain variable region (HCVR) that comprises the amino acid sequence set forth in SEQ ID NO: 277, or a heavy chain variable region that includes HCDR1, HCDR2 and HCDR3 of such a HCVR- linked to the CH1 domain-and a light chain variable region (LCVR) that comprises the amino acid sequence set forth in SEQ ID NO: 282, or LCDR1, LCDR2 and LCDR3 of such a LCVR-linked to the CL domain; (8) a heavy chainvariable region (HCVR) that comprises the amino acid sequence set forth in SEQ ID NO: 287, or a heavy chain variable region that includes HCDR1, HCDR2 and HCDR3 of such a HCVR-linked to the CH1 domain-and a light chain variable region (LCVR) that comprises the amino acid sequence set forth in SEQ ID NO: 292, or LCDR1, LCDR2 and LCDR3 of such a LCVR-linked to the CL domain; (9) a heavy chain variable region (HCVR) that comprises the amino acid sequence set forth in SEQ ID NO: 297, or a heavy chain variable region that includes HCDR1, HCDR2 and HCDR3 of such a HCVR- linked to the CH1 domain-and a light chain variable region (LCVR) that comprises the amino acid sequence set forth in SEQ ID NO: 302, or LCDR1, LCDR2 and LCDR3 of such a LCVR-linked to the CL domain; (10) a heavy chain variable region (HCVR) that comprises the amino acid sequence set forth in SEQ ID NO: 307, or a heavy chain variable region that includes HCDR1, HCDR2 and HCDR3 of such a HCVR-linked to the CH1 domain-and a light chain variable region (LCVR) that comprises the amino acid sequence set forth in SEQ ID NO: 312, or LCDR1, LCDR2 and LCDR3 of such a LCVR-linked to the CL domain; (11) a heavy chain variable region (HCVR) that comprises the amino acid sequence set forth in SEQ ID NO: 317, or a heavy chain variable region that includes HCDR1, HCDR2 and HCDR3 of such a HCVR- linked to the CH1 domain-and a light chain variable region (LCVR) that comprises the amino acid sequence set forth in SEQ ID NO: 322, or LCDR1, LCDR2 and LCDR3 of such a LCVR-linked to the CL domain; (12) a heavy chain variable region (HCVR) that comprises the amino acid sequence set forth in SEQ ID NO: 327, or a heavy chain variable region that includes HCDR1, HCDR2 and HCDR3 of such a HCVR-linked to the CH1 domain-and a light chain variable region (LCVR) that comprises the amino acid sequence set forth in SEQ ID NO: 332, or LCDR1, LCDR2 and LCDR3 of such a LCVR-linked to the CL domain; (13) a heavy chain variable region (HCVR) that comprises the amino acid sequence set forth in SEQ ID NO: 337, or a heavy chain variable region that includes HCDR1, HCDR2 and HCDR3 of such a HCVR- linked to the CH1 domain-and a light chain variable region (LCVR) that comprises the amino acid sequence set forth in SEQ ID NO: 342, or LCDR1, LCDR2 and LCDR3 of such a LCVR-linked to the CL domain; (14) a heavy chain variable region (HCVR) that comprises the amino acid sequence set forth in SEQ ID NO: 347, or a heavy chain variable region that includes HCDR1, HCDR2 and HCDR3 of such a HCVR-linked to the CH1 domain-and a light chain variable region (LCVR) that comprises the amino acid sequence set forth in SEQ ID NO: 352, or LCDR1, LCDR2 and LCDR3 of such a LCVR-linked to the CL domain; (15) a heavy chain variable region (HCVR) that comprises the amino acid sequence set forth in SEQ ID NO: 357, or a heavy chain variable region that includes HCDR1, HCDR2 and HCDR3 of such a HCVR- linked to the CH1 domain-and a light chain variable region (LCVR) that comprises the amino acid sequence set forth in SEQ ID NO: 362, or LCDR1, LCDR2 and LCDR3 of such a LCVR-linked to the CL domain; (16) a heavy chain variable region (HCVR) that comprises the amino acid sequence set forth in SEQ ID NO: 367, or a heavy chain variable region that includes HCDR1, HCDR2 and HCDR3 of such a HCVR-linked to the CH1 domain-and a light chain variable region (LCVR) that comprises the amino acid sequence set forth in SEQ ID NO: 372, or LCDR1, LCDR2 and LCDR3 of such a LCVR-linked to the CL domain; (17) a heavy chain variable region (HCVR) that comprises the amino acid sequence set forth in SEQ ID NO: 377, or a heavy chain variable region that includes HCDR1, HCDR2 and HCDR3 of such a HCVR- linked to the CH1 domain-and a light chain variable region (LCVR) that comprises the amino acid sequence set forth in SEQ ID NO: 382, or LCDR1, LCDR2 and LCDR3 of such a LCVR-linked to the CL domain; (18) a heavy chain variable region (HCVR) that comprises the amino acid sequence set forth in SEQ ID NO: 387, or a heavy chain variable region that includes HCDR1, HCDR2 and HCDR3 of such a HCVR-linked to the CH1 domain-and a light chain variable region (LCVR) that comprises the amino acid sequence set forth in SEQ ID NO: 392, or LCDR1, LCDR2 and LCDR3 of such a LCVR-linked to the CL domain; (19) a heavy chain variable region (HCVR) that comprises the amino acid sequence set forth in SEQ ID NO: 397, or a heavy chain variable region that includes HCDR1, HCDR2 and HCDR3 of such a HCVR- linked to the CH1 domain-and a light chain variable region (LCVR) that comprises the amino acid sequence set forth in SEQ ID NO: 402, or LCDR1, LCDR2 and LCDR3 of such a LCVR-linked to the CL domain; (20) a heavy chain variable region (HCVR) that comprises the amino acid sequence set forth in SEQ ID NO: 407, or a heavy chain variable region that includes HCDR1, HCDR2 and HCDR3 of such a HCVR-linked to the CH1 domain-and a light chain variable region (LCVR) that comprises the amino acid sequence set forth in SEQ ID NO: 412, or LCDR1, LCDR2 and LCDR3 of such a LCVR-linked to the CL domain; (21) a heavy chain variable region (HCVR) that comprises the amino acid sequence set forth in SEQ ID NO: 417, or a heavy chain variable region that includes HCDR1, HCDR2 and HCDR3 of such a HCVR- linked to the CH1 domain-and a light chain variable region (LCVR) that comprises the amino acid sequence set forth in SEQ ID NO: 422, orLCDR1, LCDR2 and LCDR3 of such a LCVR-linked to the CL domain; (22) a heavy chain variable region (HCVR) that comprises the amino acid sequence set forth in SEQ ID NO: 427, or a heavy chain variable region that includes HCDR1, HCDR2 and HCDR3 of such a HCVR-linked to the CH1 domain-and a light chain variable region (LCVR) that comprises the amino acid sequence set forth in SEQ ID NO: 432, or LCDR1, LCDR2 and LCDR3 of such a LCVR-linked to the CL domain; (23) a heavy chain variable region (HCVR) that comprises the amino acid sequence set forth in SEQ ID NO: 437, or a heavy chain variable region that includes HCDR1, HCDR2 and HCDR3 of such a HCVR- linked to the CH1 domain-and a light chain variable region (LCVR) that comprises the amino acid sequence set forth in SEQ ID NO: 442, or LCDR1, LCDR2 and LCDR3 of such a LCVR-linked to the CL domain; (24) a heavy chain variable region (HCVR) that comprises the amino acid sequence set forth in SEQ ID NO: 447, or a heavy chain variable region that includes HCDR1, HCDR2 and HCDR3 of such a HCVR-linked to the CH1 domain-and a light chain variable region (LCVR) that comprises the amino acid sequence set forth in SEQ ID NO: 452, or LCDR1, LCDR2 and LCDR3 of such a LCVR-linked to the CL domain; (25) a heavy chain variable region (HCVR) that comprises the amino acid sequence set forth in SEQ ID NO: 457, or a heavy chain variable region that includes HCDR1, HCDR2 and HCDR3 of such a HCVR- linked to the CH1 domain-and a light chain variable region (LCVR) that comprises the amino acid sequence set forth in SEQ ID NO: 462, or LCDR1, LCDR2 and LCDR3 of such a LCVR-linked to the CL domain; (26) a heavy chain variable region (HCVR) that comprises the amino acid sequence set forth in SEQ ID NO: 467, or a heavy chain variable region that includes HCDR1, HCDR2 and HCDR3 of such a HCVR-linked to the CH1 domain-and a light chain variable region (LCVR) that comprises the amino acid sequence set forth in SEQ ID NO: 472, or LCDR1, LCDR2 and LCDR3 of such a LCVR-linked to the CL domain; (27) a heavy chain variable region (HCVR) that comprises the amino acid sequence set forth in SEQ ID NO: 477, or a heavy chain variable region that includes HCDR1, HCDR2 and HCDR3 of such a HCVR- linked to the CH1 domain-and a light chain variable region (LCVR) that comprises the amino acid sequence set forth in SEQ ID NO: 482, or LCDR1, LCDR2 and LCDR3 of such a LCVR-linked to the CL domain; (28) a heavy chain variable region (HCVR) that comprises the amino acid sequence set forth in SEQ ID NO: 487, or a heavy chain variable region that includes HCDR1, HCDR2 and HCDR3 of such a HCVR-linked to the CH1 domain-and a light chain variable region (LCVR) that comprises the aminoacid sequence set forth in SEQ ID NO: 492, or LCDR1, LCDR2 and LCDR3 of such a LCVR-linked to the CL domain; (29) a heavy chain variable region (HCVR) that comprises the amino acid sequence set forth in SEQ ID NO: 497, or a heavy chain variable region that includes HCDR1, HCDR2 and HCDR3 of such a HCVR- linked to the CH1 domain-and a light chain variable region (LCVR) that comprises the amino acid sequence set forth in SEQ ID NO: 502, or LCDR1, LCDR2 and LCDR3 of such a LCVR-linked to the CL domain; (30) a heavy chain variable region (HCVR) that comprises the amino acid sequence set forth in SEQ ID NO: 507, or a heavy chain variable region that includes HCDR1, HCDR2 and HCDR3 of such a HCVR-linked to the CH1 domain-and a light chain variable region (LCVR) that comprises the amino acid sequence set forth in SEQ ID NO: 512, or LCDR1, LCDR2 and LCDR3 of such a LCVR-linked to the CL domain; (31) a heavy chain variable region (HCVR) that comprises the amino acid sequence set forth in SEQ ID NO: 517, or a heavy chain variable region that includes HCDR1, HCDR2 and HCDR3 of such a HCVR- linked to the CH1 domain-and a light chain variable region (LCVR) that comprises the amino acid sequence set forth in SEQ ID NO: 522, or LCDR1, LCDR2 and LCDR3 of such a LCVR-linked to the CL domain; and/or (32) a heavy chain variable region (HCVR) that comprises the amino acid sequence set forth in SEQ ID NO: 527, or a heavy chain variable region that includes HCDR1, HCDR2 and HCDR3 of such a HCVR- linked to the CH1 domain-and a light chain variable region (LCVR) that comprises the amino acid sequence set forth in SEQ ID NO: 532, or LCDR1, LCDR2 and LCDR3 of such a LCVR-linked to the CL domain. For example, the CH1 can be SEQ ID NO: 602 or 674.

[0350] In one example, the Fab protein can comprise: (1) a light chain that comprises the amino acid sequence set forth in SEQ ID NO: 603 and a heavy chain that comprises the amino acid sequence set forth in SEQ ID NO: 604 (31874B); (2) a light chain that comprises the amino acid sequence set forth in SEQ ID NO: 605 and a heavy chain that comprises the amino acid sequence set forth in SEQ ID NO: 606 (31863B); (3) a light chain that comprises the amino acid sequence set forth in SEQ ID NO: 607 and a heavy chain that comprises the amino acid sequence set forth in SEQ ID NO: 608 (69348); (4) a light chain that comprises the amino acid sequence set forth in SEQ ID NO: 609 and a heavy chain that comprises the amino acid sequence set forth in SEQ ID NO: 610 (69340); (5) a light chain that comprises the amino acid sequence set forth in SEQ ID NO: 611 and a heavy chain that comprises the amino acid sequence set forth in SEQ ID NO: 612 (69331); (6) a light chain that comprises the amino acid sequence set forth in SEQ ID NO: 613 and a heavy chain that comprises the amino acid sequence set forth in SEQ ID NO: 614 (69332); (7) a light chain that comprises the amino acid sequence set forth in SEQ ID NO: 615 and a heavy chain that comprises the amino acid sequence set forth in SEQ ID NO: 616 (69326); (8) a light chain that comprises the amino acid sequence set forth in SEQ ID NO: 617 and a heavy chain that comprises the amino acid sequence set forth in SEQ ID NO: 618 (69329); (9) a light chain that comprises the amino acid sequence set forth in SEQ ID NO: 619 and a heavy chain that comprises the amino acid sequence set forth in SEQ ID NO: 620 (69323); (10) a light chain that comprises the amino acid sequence set forth in SEQ ID NO: 621 and a heavy chain that comprises the amino acid sequence set forth in SEQ ID NO: 622 (69305); (11) a light chain that comprises the amino acid sequence set forth in SEQ ID NO: 623 and a heavy chain that comprises the amino acid sequence set forth in SEQ ID NO: 624 (69307); (12) a light chain that comprises the amino acid sequence set forth in SEQ ID NO: 625 and a heavy chain that comprises the amino acid sequence set forth in SEQ ID NO: 626 (12795B); (13) a light chain that comprises the amino acid sequence set forth in SEQ ID NO: 627 and a heavy chain that comprises the amino acid sequence set forth in SEQ ID NO: 628 or SEQ ID NO: 667 (12798B); (14) a light chain that comprises the amino acid sequence set forth in SEQ ID NO: 629 and a heavy chain that comprises the amino acid sequence set forth in SEQ ID NO: 630 or SEQ ID NO: 668 (12799B); (15) a light chain that comprises the amino acid sequence set forth in SEQ ID NO: 631 and a heavy chain that comprises the amino acid sequence set forth in SEQ ID NO: 632 (12801B); (16) a light chain that comprises the amino acid sequence set forth in SEQ ID NO: 633 and a heavy chain that comprises the amino acid sequence set forth in SEQ ID NO: 634 (12802B); (17) a light chain that comprises the amino acid sequence set forth in SEQ ID NO: 635 and a heavy chain that comprises the amino acid sequence set forth in SEQ ID NO: 636 (12808B); (18) a light chain that comprises the amino acid sequence set forth in SEQ ID NO: 637 and a heavy chain that comprises the amino acid sequence set forth in SEQ ID NO: 638 (12812B); (19) a light chain that comprises the amino acid sequence set forth in SEQ ID NO: 639 and a heavy chain that comprises the amino acid sequence set forth in SEQ ID NO: 640 (12816B); (20) a light chain that comprises the amino acid sequence set forth in SEQ ID NO: 641 and a heavy chain that comprises the amino acid sequence set forth in SEQ ID NO: 642 (12833B); (21) a light chain that comprises the amino acid sequence set forth in SEQ ID NO: 643 and a heavy chain that comprises the amino acid sequence set forth in SEQ ID NO: 644 (12834B); (22) a light chain that comprises the amino acid sequence set forth in SEQ ID NO: 645 and a heavy chain that comprises the amino acid sequence set forth in SEQ ID NO: 646 (12835B); (23) a light chain that comprises the amino acid sequence set forth in SEQ ID NO: 647 and a heavy chain that comprises the amino acid sequence set forth in SEQ ID NO: 648 or SEQ ID NO: 669 (12847B); (24) a light chain that comprises the amino acid sequence set forth in SEQ ID NO: 649 and a heavy chain that comprises the amino acid sequence set forth in SEQ ID NO: 650 (12848B); (25) a light chain that comprises the amino acid sequence set forth in SEQ ID NO: 651 and a heavy chain that comprises the amino acid sequence set forth in SEQ ID NO: 652 or SEQ ID NO: 670 (12843B); (26) a light chain that comprises the amino acid sequence set forth in SEQ ID NO: 653 and a heavy chain that comprises the amino acid sequence set forth in SEQ ID NO: 654 (12844B); (27) a light chain that comprises the amino acid sequence set forth in SEQ ID NO: 655 and a heavy chain that comprises the amino acid sequence set forth in SEQ ID NO: 656 or SEQ ID NO: 671 (12845B); (28) a light chain that comprises the amino acid sequence set forth in SEQ ID NO: 657 and a heavy chain that comprises the amino acid sequence set forth in SEQ ID NO: 658 or SEQ ID NO: 672 (12839B); (29) a light chain that comprises the amino acid sequence set forth in SEQ ID NO: 659 and a heavy chain that comprises the amino acid sequence set forth in SEQ ID NO: 660 (12841B); (30) a light chain that comprises the amino acid sequence set forth in SEQ ID NO: 661 and a heavy chain that comprises the amino acid sequence set forth in SEQ ID NO: 662 (12850B); (31) a light chain that comprises the amino acid sequence set forth in SEQ ID NO: 663 and a heavy chain that comprises the amino acid sequence set forth in SEQ ID NO: 664 (69261); or (32) a light chain that comprises the amino acid sequence set forth in SEQ ID NO: 665 and a heavy chain that comprises the amino acid sequence set forth in SEQ ID NO: 666 (69263).

[0351] “31874B”; “31863B”; “69348”; “69340”; “69331”; “69332”; “69326”; “69329”; “69323”; “69305”; “69307”; “12795B”; “12798B”; “12799B”; “12801B”; “12802B”; “12808B”; “12812B”; “12816B”; “12833B”; “12834B”; “12835B”; “12847B”; “12848B”; “12843B”; “12844B”; “12845B”; “12839B”; “12841B”; “12850B”; “69261”; and “69263” refer to anti-TfR:GAA fusion proteins, e.g., anti-TfR scFv:GAA or anti-TfR Fab:GAA, comprising a light chain variable region comprising the amino acid sequence set forth in SEQ ID NO: 222, 232, 242, 252, 262, 272, 282, 292, 302, 312, 322, 332, 342, 352, 362, 372, 382, 392, 402, 412, 422, 432, 442, 452, 462, 472, 482, 492, 502, 512, 522, or 532 (or a variant thereof), and a heavy chain variable region comprising the amino acid sequence set forth in SEQ ID NO: 217, 227, 237, 247, 257, 267, 277, 287, 297, 307, 317, 327, 337, 347, 357, 367, 377, 387, 397, 407, 417, 427, 437, 447, 457, 467, 477, 487, 497, 507, 517, or 527 (or a variant thereof); which, in the case of an scFv, can be fused together (in either order), e.g., by a peptide linker (e.g., (G₄S)₃) (G₄S = SEQ ID NO: 600), respectively; or that comprise a V_{H} that comprises the CDRs thereof (CDR-H1 (or a variant thereof), CDR-H2 (or a variant thereof) and CDR-H3 (or a variant thereof)) and/or a V_{L} that comprises the CDRs thereof (CDR-L1 (or a variant thereof), CDR-L2 (or a variant thereof) and CDR-L3 (or a variant thereof)), wherein the V_{H} fused to the V_{L} or the V_{L} fused to the V_{H}, in the case of an scFv, can be fused, e.g., by a peptide linker (e.g., (G₄S)₂) (G₄S = SEQ ID NO: 600), to GAA.

[0352] The TfR-binding delivery domain coding sequences in the constructs disclosed herein may include one or more modifications such as codon optimization (e.g., to human codons), depletion of CpG dinucleotides, mutation of cryptic splice sites, addition of one or more glycosylation sites, or any combination thereof. CpG dinucleotides in a construct can limit the therapeutic utility of the construct. First, unmethylated CpG dinucleotides can interact with host toll-like receptor-9 (TLR-9) to stimulate innate, proinflammatory immune responses. Second, once the CpG dinucleotides become methylated, they can result in the suppression of transgene expression coordinated by methyl-CpG binding proteins. Cryptic splice sites are sequences in a pre-messenger RNA that are not normally used as splice sites, but that can be activated, for example, by mutations that either inactivate canonical splice sites or create splice sites where one did not exist before. Accurate splice site selection is critical for successful gene expression, and removal of cryptic splice sites can favor use of the normal or intended splice site.

[0353] In one example, a TfR-binding delivery domain coding sequence in a construct disclosed herein has one or more cryptic splice sites mutated or removed. In another example, a TfR-binding delivery domain coding sequence in a construct disclosed herein has all identified cryptic splice sites mutated or removed. In another example, a TfR-binding delivery domain coding sequence in a construct disclosed herein has one or more CpG dinucleotides removed (i.e., is CpG depleted). In another example, a TfR-binding delivery domain coding sequence in a construct disclosed herein has all CpG dinucleotides removed (i.e., is fully CpG depleted). In another example, a TfR-binding delivery domain coding sequence in a construct disclosed herein is codon optimized (e.g., codon optimized for expression in a human or mammal). In a specific example, a CDTfR63-binding delivery domain coding sequence in a construct disclosed herein has one or more CpG dinucleotides removed (i.e., is CpG depleted) and has one or more cryptic splice sites mutated or removed. In another specific example, a TfR-binding delivery domain coding sequence in a construct disclosed herein has all CpG dinucleotides removed and has one or more or all identified cryptic splice sites mutated or removed. In another specific example, a TfR-binding delivery domain coding sequence in a construct disclosed herein has one or more CpG dinucleotides removed (i.e., is CpG depleted) and is codon optimized (e.g., codon optimized for expression in a human or mammal). In another specific example, a TfR-binding delivery domain coding sequence in a construct disclosed herein has all CpG dinucleotides removed (i.e., is fully CpG depleted) and is codon optimized (e.g., codon optimized for expression in a human or mammal).

[0354] Various anti-TfR scFv coding sequences are provided. In one example, the anti-TfR scFv coding sequence encodes an anti-TfR scFv protein (or an anti-TfR scFv protein comprising a sequence) at least 90%, at least 91%, at least 92%, at least 93%, at least 94%, at least 95%, at least 96%, at least 97%, at least 98%, at least 99%, at least 99.5%, or 100% identical to any one of SEQ ID NOS: 538-569 (and, e.g., retaining TfR-binding activity). Optionally, the anti-TfR scFv coding sequence encodes an anti-TfR scFv protein (or an anti-TfR scFv protein comprising a sequence) at least 95%, at least 96%, at least 97%, at least 98%, at least 99%, at least 99.5%, or 100% identical to any one of SEQ ID NOS: 538-569 (and, e.g., retaining TfR-binding activity). Optionally, the anti-TfR scFv coding sequence in the above examples encodes an anti-TfR scFv protein (or an anti-TfR scFv protein comprising a sequence) at least 99%, at least 99.5%, or 100% identical to any one of SEQ ID NOS: 538-569 (and, e.g., retaining TfR-binding activity). Optionally, the anti-TfR scFv coding sequence in the above examples encodes an anti-TfR scFv protein comprising the sequence set forth in any one of SEQ ID NOS: 538-569. Optionally, the anti-TfR scFv coding sequence in the above examples encodes an anti-TfR scFv protein consisting essentially of the sequence set forth in any one of SEQ ID NOS: 538-569. Optionally, the anti-TfR scFv coding sequence in the above examples encodes an anti-TfR scFv protein consisting of the sequence set forth in any one of SEQ ID NOS: 538-569.

[0355] Various anti-TfR scFv coding sequences are provided. In one example, the anti-TfR scFv coding sequence is (or comprises a sequence) at least 90%, at least 91%, at least 92%, at least 93%, at least 94%, at least 95%, at least 96%, at least 97%, at least 98%, at least 99%, at least 99.5%, or 100% identical to any one of SEQ ID NOS: 587-599. In another example, the anti-TfR scFv coding sequence is (or comprises a sequence) at least 95%, at least 96%, at least 97%, at least 98%, at least 99%, at least 99.5%, or 100% identical to any one of SEQ ID NOS: 587-599. In another example, the anti-TfR scFv coding sequence is (or comprises a sequence) at least 99%, at least 99.5%, or 100% identical to any one of SEQ ID NOS: 587-599. In another example, the anti-TfR scFv coding sequence comprises the sequence set forth in any one of SEQ ID NOS: 587-599. In another example, the anti-TfR scFv coding sequence consists essentially of the sequence set forth in any one of SEQ ID NOS: 587-599. In another example, the anti-TfR scFv coding sequence consists of the sequence set forth in any one of SEQ ID NOS: 587-599. Optionally, the anti-TfR scFv coding sequence encodes an anti-TfR scFv protein (or an anti-TfR scFv protein comprising a sequence) at least 90%, at least 91%, at least 92%, at least 93%, at least 94%, at least 95%, at least 96%, at least 97%, at least 98%, at least 99%, at least 99.5%, or 100% identical to any one of SEQ ID NOS: 540, 549, 551, and 554 (and, e.g., retaining TfR-binding activity). Optionally, the anti-TfR scFv coding sequence encodes an anti-TfR scFv protein (or an anti-TfR scFv protein comprising a sequence) at least 95%, at least 96%, at least 97%, at least 98%, at least 99%, at least 99.5%, or 100% identical to any one of SEQ ID NOS: 540, 549, 551, and 554 (and, e.g., retaining TfR-binding activity). Optionally, the anti-TfR scFv coding sequence in the above examples encodes an anti-TfR scFv protein (or an anti-TfR scFv protein comprising a sequence) at least 99%, at least 99.5%, or 100% identical to any one of SEQ ID NOS: 540, 549, 551, and 554 (and, e.g., retaining TfR-binding activity). Optionally, the anti-TfR scFv coding sequence in the above examples encodes an anti-TfR scFv protein comprising the sequence set forth in any one of SEQ ID NOS: 540, 549, 551, and 554. Optionally, the anti-TfR scFv coding sequence in the above examples encodes an anti-TfR scFv protein consisting essentially of the sequence set forth in any one of SEQ ID NOS: 540, 549, 551, and 554. Optionally, the anti-TfR scFv coding sequence in the above examples encodes an anti-TfR scFv protein consisting of the sequence set forth in any one of SEQ ID NOS: 540, 549, 551, and 554.

[0356] Various anti-TfR scFv coding sequences are provided. In one example, the anti-TfR scFv coding sequence is (or comprises a sequence) at least 90%, at least 91%, at least 92%, at least 93%, at least 94%, at least 95%, at least 96%, at least 97%, at least 98%, at least 99%, at least 99.5%, or 100% identical to any one of SEQ ID NOS: 593-595 and 599. In another example, the anti-TfR scFv coding sequence is (or comprises a sequence) at least 95%, at least 96%, at least 97%, at least 98%, at least 99%, at least 99.5%, or 100% identical to any one of SEQ ID NOS: 593-595 and 599. In another example, the anti-TfR scFv coding sequence is (or comprises a sequence) at least 99%, at least 99.5%, or 100% identical to any one of SEQ ID NOS: 593-595 and 599. In another example, the anti-TfR scFv coding sequence comprises the sequence set forth in any one of SEQ ID NOS: 593-595 and 599. In another example, the anti-TfR scFv coding sequence consists essentially of the sequence set forth in any one of SEQ ID NOS: 593-595 and 599. In another example, the anti-TfR scFv coding sequence consists of the sequence set forth in any one of SEQ ID NOS: 593-595 and 599. Optionally, the anti-TfR scFv coding sequence encodes an anti-TfR scFv protein (or an anti-TfR scFv protein comprising a sequence) at least 90%, at least 91%, at least 92%, at least 93%, at least 94%, at least 95%, at least 96%, at least 97%, at least 98%, at least 99%, at least 99.5%, or 100% identical to SEQ ID NO: 554 (and, e.g., retaining TfR-binding activity). Optionally, the anti-TfR scFv coding sequence encodes an anti-TfR scFv protein (or an anti-TfR scFv protein comprising a sequence) at least 95%, at least 96%, at least 97%, at least 98%, at least 99%, at least 99.5%, or 100% identical to SEQ ID NO: 554 (and, e.g., retaining TfR-binding activity). Optionally, the anti-TfR scFv coding sequence in the above examples encodes an anti-TfR scFv protein (or an anti-TfR scFv protein comprising a sequence) at least 99%, at least 99.5%, or 100% identical to SEQ ID NO: 554 (and, e.g., retaining TfR-binding activity). Optionally, the anti-TfR scFv coding sequence in the above examples encodes an anti-TfR scFv protein comprising the sequence set forth in SEQ ID NO: 554. Optionally, the anti-TfR scFv coding sequence in the above examples encodes an anti-TfR scFv protein consisting essentially of the sequence set forth in SEQ ID NO: 554. Optionally, the anti-TfR scFv coding sequence in the above examples encodes an anti-TfR scFv protein consisting of the sequence set forth in SEQ ID NO: 554.

[0357] Various codon optimized anti-TfR scFv coding sequences are provided. The anti-TfR scFv coding sequence can be, for example, CpG-depleted (e.g., fully CpG depleted) and/or codon optimized (e.g., CpG depleted (e.g., fully CpG-depleted) and codon optimized). In one example, the anti-TfR scFv coding sequence is (or comprises a sequence) at least 90%, at least 91%, at least 92%, at least 93%, at least 94%, at least 95%, at least 96%, at least 97%, at least 98%, at least 99%, at least 99.5%, or 100% identical to any one of SEQ ID NOS: 587-595. In another example, the anti-TfR scFv coding sequence is (or comprises a sequence) at least 95%, at least 96%, at least 97%, at least 98%, at least 99%, at least 99.5%, or 100% identical to any one of SEQ ID NOS: 587-595. In another example, the anti-TfR scFv coding sequence is (or comprises a sequence) at least 99%, at least 99.5%, or 100% identical to any one of SEQ ID NOS: 587-595. In another example, the anti-TfR scFv coding sequence comprises the sequence set forth in any one of SEQ ID NOS: 587-595. In another example, the anti-TfR scFv coding sequence consists essentially of the sequence set forth in any one of SEQ ID NOS: 587-595. In another example, the anti-TfR scFv coding sequence consists of the sequence set forth in any one of SEQ ID NOS: 587-595. Optionally, the anti-TfR scFv coding sequence encodes an anti-TfR scFv protein (or an anti-TfR scFv protein comprising a sequence) at least 90%, at least 91%, at least 92%, at least 93%, at least 94%, at least 95%, at least 96%, at least 97%, at least 98%, at least 99%, at least 99.5%, or 100% identical to any one of SEQ ID NOS: 540, 549, 551, and 554 (and, e.g., retaining TfR-binding activity). Optionally, the anti-TfR scFv coding sequence encodes an anti-TfR scFv protein (or an anti-TfR scFv protein comprising a sequence) at least 95%, at least 96%, at least 97%, at least 98%, at least 99%, at least 99.5%, or 100% identical to any one of SEQ ID NOS: 540, 549, 551, and 554 (and, e.g., retaining TfR-binding activity). Optionally, the anti-TfR scFv coding sequence in the above examples encodes an anti-TfR scFv protein (or an anti-TfR scFv protein comprising a sequence) at least 99%, at least 99.5%, or 100% identical to any one of SEQ ID NOS: 540, 549, 551, and 554 (and, e.g., retaining TfR-binding activity). Optionally, the anti-TfR scFv coding sequence in the above examples encodes an anti-TfR scFv protein comprising the sequence set forth in any one of SEQ ID NOS: 540, 549, 551, and 554. Optionally, the anti-TfR scFv coding sequence in the above examples encodes an anti-TfR scFv protein consisting essentially of the sequence set forth in any one of SEQ ID NOS: 540, 549, 551, and 554. Optionally, the anti-TfR scFv coding sequence in the above examples encodes an anti-TfR scFv protein consisting of the sequence set forth in any one of SEQ ID NOS: 540, 549, 551, and 554.

[0358] Various codon optimized anti-TfR scFv coding sequences are provided. The anti-TfR scFv coding sequence can be, for example, CpG-depleted (e.g., fully CpG depleted) and/or codon optimized (e.g., CpG depleted (e.g., fully CpG-depleted) and codon optimized). In one example, the anti-TfR scFv coding sequence is (or comprises a sequence) at least 90%, at least 91%, at least 92%, at least 93%, at least 94%, at least 95%, at least 96%, at least 97%, at least 98%, at least 99%, at least 99.5%, or 100% identical to any one of SEQ ID NOS: 593-595. In another example, the anti-TfR scFv coding sequence is (or comprises a sequence) at least 95%, at least 96%, at least 97%, at least 98%, at least 99%, at least 99.5%, or 100% identical to any one of SEQ ID NOS: 593-595. In another example, the anti-TfR scFv coding sequence is (or comprises a sequence) at least 99%, at least 99.5%, or 100% identical to any one of SEQ ID NOS: 593-595. In another example, the anti-TfR scFv coding sequence comprises the sequence set forth in any one of SEQ ID NOS: 593-595. In another example, the anti-TfR scFv coding sequence consists essentially of the sequence set forth in any one of SEQ ID NOS: 593-595. In another example, the anti-TfR scFv coding sequence consists of the sequence set forth in any one of SEQ ID NOS: 593-595. Optionally, the anti-TfR scFv coding sequence encodes an anti-TfR scFv protein (or an anti-TfR scFv protein comprising a sequence) at least 90%, at least 91%, at least 92%, at least 93%, at least 94%, at least 95%, at least 96%, at least 97%, at least 98%, at least 99%, at least 99.5%, or 100% identical to SEQ ID NO: 554 (and, e.g., retaining TfR-binding activity). Optionally, the anti-TfR scFv coding sequence encodes an anti-TfR scFv protein (or an anti-TfR scFv protein comprising a sequence) at least 95%, at least 96%, at least 97%, at least 98%, at least 99%, at least 99.5%, or 100% identical to SEQ ID NO: 554 (and, e.g., retaining TfR-binding activity). Optionally, the anti-TfR scFv coding sequence in the above examples encodes an anti-TfR scFv protein (or an anti-TfR scFv protein comprising a sequence) at least 99%, at least 99.5%, or 100% identical to SEQ ID NO: 554 (and, e.g., retaining TfR-binding activity). Optionally, the anti-TfR scFv coding sequence in the above examples encodes an anti-TfR scFv protein comprising the sequence set forth in SEQ ID NO: 554. Optionally, the anti-TfR scFv coding sequence in the above examples encodes an anti-TfR scFv protein consisting essentially of the sequence set forth in SEQ ID NO: 554. Optionally, the anti-TfR scFv coding sequence in the above examples encodes an anti-TfR scFv protein consisting of the sequence set forth in SEQ ID NO: 554.

[0359] In one example, the anti-TfR scFv coding sequence is (or comprises a sequence) at least 90%, at least 91%, at least 92%, at least 93%, at least 94%, at least 95%, at least 96%, at least 97%, at least 98%, at least 99%, at least 99.5%, or 100% identical to SEQ ID NO: 593. In another example, the anti-TfR scFv coding sequence is (or comprises a sequence) at least 90%, at least 91%, at least 92%, at least 93%, at least 94%, at least 95%, at least 96%, at least 97%, at least 98%, at least 99%, at least 99.5%, or 100% identical to SEQ ID NO: 593 and encodes an anti-TfR scFv protein (or an anti-TfR scFv protein comprising a sequence) at least 99%, at least 99.5%, or 100% identical to SEQ ID NO: 554. In another example, the anti-TfR scFv coding sequence is (or comprises a sequence) at least 90%, at least 91%, at least 92%, at least 93%, at least 94%, at least 95%, at least 96%, at least 97%, at least 98%, at least 99%, at least 99.5%, or 100% identical to SEQ ID NO: 593 and encodes an anti-TfR scFv protein comprising the sequence set forth in SEQ ID NO: 554. In another example, the anti-TfR scFv coding sequence is (or comprises a sequence) at least 95%, at least 96%, at least 97%, at least 98%, at least 99%, at least 99.5%, or 100% identical to SEQ ID NO: 593. In another example, the anti-TfR scFv coding sequence is (or comprises a sequence) at least 95%, at least 96%, at least 97%, at least 98%, at least 99%, at least 99.5%, or 100% identical to SEQ ID NO: 593 and encodes an anti-TfR scFv protein (or an anti-TfR scFv protein comprising a sequence) at least 99%, at least 99.5%, or 100% identical to SEQ ID NO: 554. In another example, the anti-TfR scFv coding sequence is (or comprises a sequence) at least 95%, at least 96%, at least 97%, at least 98%, at least 99%, at least 99.5%, or 100% identical to SEQ ID NO: 593 and encodes an anti-TfR scFv protein comprising the sequence set forth in SEQ ID NO: 554. In another example, the anti-TfR scFv coding sequence is (or comprises a sequence) at least 99%, at least 99.5%, or 100% identical to SEQ ID NO: 593. In another example, the anti-TfR scFv coding sequence is (or comprises a sequence) at least 99%, at least 99.5%, or 100% identical to SEQ ID NO: 593 and encodes an anti-TfR scFv protein (or an anti-TfR scFv protein comprising a sequence) at least 99%, at least 99.5%, or 100% identical to SEQ ID NO: 554. In another example, the anti-TfR scFv coding sequence is (or comprises a sequence) at least 99%, at least 99.5%, or 100% identical to SEQ ID NO: 593 and encodes an anti-TfR scFv protein comprising the sequence set forth in SEQ ID NO: 554. In another example, the anti-TfR scFv coding sequence comprises the sequence set forth in SEQ ID NO: 593. In another example, the anti-TfR scFv coding sequence consists essentially of the sequence set forth in SEQ ID NO: 593. In another example, the anti-TfR scFv coding sequence consists of the sequence set forth in SEQ ID NO: 593. The anti-TfR coding sequence can be, for example, CpG-depleted (e.g., fully CpG-depleted) and/or codon optimized. For example, the anti-TfR scFv coding sequence can be CpG depleted (e.g., fully CpG-depleted) and codon optimized. Optionally, the anti-TfR scFv coding sequence encodes an anti-TfR scFv protein (or an anti-TfR scFv protein comprising a sequence) at least 90%, at least 91%, at least 92%, at least 93%, at least 94%, at least 95%, at least 96%, at least 97%, at least 98%, at least 99%, at least 99.5%, or 100% identical to SEQ ID NO: 554 (and, e.g., retaining TfR-binding activity). Optionally, the anti-TfR scFv coding sequence encodes an anti-TfR scFv protein (or an anti-TfR scFv protein comprising a sequence) at least 95%, at least 96%, at least 97%, at least 98%, at least 99%, at least 99.5%, or 100% identical to SEQ ID NO: 554 (and, e.g., retaining TfR-binding activity). Optionally, the anti-TfR scFv coding sequence in the above examples encodes an anti-TfR scFv protein (or an anti-TfR scFv protein comprising a sequence) at least 99%, at least 99.5%, or 100% identical to SEQ ID NO: 554 (and, e.g., retaining TfR-binding activity). Optionally, the anti-TfR scFv coding sequence in the above examples encodes an anti-TfR scFv protein comprising the sequence set forth in SEQ ID NO: 554. Optionally, the anti-TfR scFv coding sequence in the above examples encodes an anti-TfR scFv protein consisting essentially of the sequence set forth in SEQ ID NO: 554. Optionally, the anti-TfR scFv coding sequence in the above examples encodes an anti-TfR scFv protein consisting of the sequence set forth in SEQ ID NO: 554.

[0360] In one example, the anti-TfR scFv coding sequence is (or comprises a sequence) at least 90%, at least 91%, at least 92%, at least 93%, at least 94%, at least 95%, at least 96%, at least 97%, at least 98%, at least 99%, at least 99.5%, or 100% identical to SEQ ID NO: 594. In another example, the anti-TfR scFv coding sequence is (or comprises a sequence) at least 90%, at least 91%, at least 92%, at least 93%, at least 94%, at least 95%, at least 96%, at least 97%, at least 98%, at least 99%, at least 99.5%, or 100% identical to SEQ ID NO: 594 and encodes an anti-TfR scFv protein (or an anti-TfR scFv protein comprising a sequence) at least 99%, at least 99.5%, or 100% identical to SEQ ID NO: 554. In another example, the anti-TfR scFv coding sequence is (or comprises a sequence) at least 90%, at least 91%, at least 92%, at least 93%, at least 94%, at least 95%, at least 96%, at least 97%, at least 98%, at least 99%, at least 99.5%, or 100% identical to SEQ ID NO: 594 and encodes an anti-TfR scFv protein comprising the sequence set forth in SEQ ID NO: 554. In another example, the anti-TfR scFv coding sequence is (or comprises a sequence) at least 95%, at least 96%, at least 97%, at least 98%, at least 99%, at least 99.5%, or 100% identical to SEQ ID NO: 594. In another example, the anti-TfR scFv coding sequence is (or comprises a sequence) at least 95%, at least 96%, at least 97%, at least 98%, at least 99%, at least 99.5%, or 100% identical to SEQ ID NO: 594 and encodes an anti-TfR scFv protein (or an anti-TfR scFv protein comprising a sequence) at least 99%, at least 99.5%, or 100% identical to SEQ ID NO: 554. In another example, the anti-TfR scFv coding sequence is (or comprises a sequence) at least 95%, at least 96%, at least 97%, at least 98%, at least 99%, at least 99.5%, or 100% identical to SEQ ID NO: 594 and encodes an anti-TfR scFv protein comprising the sequence set forth in SEQ ID NO: 554. In another example, the anti-TfR scFv coding sequence is (or comprises a sequence) at least 99%, at least 99.5%, or 100% identical to SEQ ID NO: 594. In another example, the anti-TfR scFv coding sequence is (or comprises a sequence) at least 99%, at least 99.5%, or 100% identical to SEQ ID NO: 594 and encodes an anti-TfR scFv protein (or an anti-TfR scFv protein comprising a sequence) at least 99%, at least 99.5%, or 100% identical to SEQ ID NO: 554. In another example, the anti-TfR scFv coding sequence is (or comprises a sequence) at least 99%, at least 99.5%, or 100% identical to SEQ ID NO: 594 and encodes an anti-TfR scFv protein comprising the sequence set forth in SEQ ID NO: 554. In another example, the anti-TfR scFv coding sequence comprises the sequence set forth in SEQ ID NO: 594. In another example, the anti-TfR scFv coding sequence consists essentially of the sequence set forth in SEQ ID NO: 594. In another example, the anti-TfR scFv coding sequence consists of the sequence set forth in SEQ ID NO: 594. The anti-TfR coding sequence can be, for example, CpG-depleted (e.g., fully CpG-depleted) and/or codon optimized. For example, the anti-TfR scFv coding sequence can be CpG depleted (e.g., fully CpG-depleted) and codon optimized. Optionally, the anti-TfR scFv coding sequence encodes an anti-TfR scFv protein (or an anti-TfR scFv protein comprising a sequence) at least 90%, at least 91%, at least 92%, at least 93%, at least 94%, at least 95%, at least 96%, at least 97%, at least 98%, at least 99%, at least 99.5%, or 100% identical to SEQ ID NO: 554 (and, e.g., retaining TfR-binding activity). Optionally, the anti-TfR scFv coding sequence encodes an anti-TfR scFv protein (or an anti-TfR scFv protein comprising a sequence) at least 95%, at least 96%, at least 97%, at least 98%, at least 99%, at least 99.5%, or 100% identical to SEQ ID NO: 554 (and, e.g., retaining TfR-binding activity). Optionally, the anti-TfR scFv coding sequence in the above examples encodes an anti-TfR scFv protein (or an anti-TfR scFv protein comprising a sequence) at least 99%, at least 99.5%, or 100% identical to SEQ ID NO: 554 (and, e.g., retaining TfR-binding activity). Optionally, the anti-TfR scFv coding sequence in the above examples encodes an anti-TfR scFv protein comprising the sequence set forth in SEQ ID NO: 554. Optionally, the anti-TfR scFv coding sequence in the above examples encodes an anti-TfR scFv protein consisting essentially of the sequence set forth in SEQ ID NO: 554. Optionally, the anti-TfR scFv coding sequence in the above examples encodes an anti-TfR scFv protein consisting of the sequence set forth in SEQ ID NO: 554.

[0361] In one example, the anti-TfR scFv coding sequence is (or comprises a sequence) at least 90%, at least 91%, at least 92%, at least 93%, at least 94%, at least 95%, at least 96%, at least 97%, at least 98%, at least 99%, at least 99.5%, or 100% identical to SEQ ID NO: 595. In another example, the anti-TfR scFv coding sequence is (or comprises a sequence) at least 90%, at least 91%, at least 92%, at least 93%, at least 94%, at least 95%, at least 96%, at least 97%, at least 98%, at least 99%, at least 99.5%, or 100% identical to SEQ ID NO: 595 and encodes an anti-TfR scFv protein (or an anti-TfR scFv protein comprising a sequence) at least 99%, at least 99.5%, or 100% identical to SEQ ID NO: 554. In another example, the anti-TfR scFv coding sequence is (or comprises a sequence) at least 90%, at least 91%, at least 92%, at least 93%, at least 94%, at least 95%, at least 96%, at least 97%, at least 98%, at least 99%, at least 99.5%, or 100% identical to SEQ ID NO: 595 and encodes an anti-TfR scFv protein comprising the sequence set forth in SEQ ID NO: 554. In another example, the anti-TfR scFv coding sequence is (or comprises a sequence) at least 95%, at least 96%, at least 97%, at least 98%, at least 99%, at least 99.5%, or 100% identical to SEQ ID NO: 595. In another example, the anti-TfR scFv coding sequence is (or comprises a sequence) at least 95%, at least 96%, at least 97%, at least 98%, at least 99%, at least 99.5%, or 100% identical to SEQ ID NO: 595 and encodes an anti-TfR scFv protein (or an anti-TfR scFv protein comprising a sequence) at least 99%, at least 99.5%, or 100% identical to SEQ ID NO: 554. In another example, the anti-TfR scFv coding sequence is (or comprises a sequence) at least 95%, at least 96%, at least 97%, at least 98%, at least 99%, at least 99.5%, or 100% identical to SEQ ID NO: 595 and encodes an anti-TfR scFv protein comprising the sequence set forth in SEQ ID NO: 554. In another example, the anti-TfR scFv coding sequence is (or comprises a sequence) at least 99%, at least 99.5%, or 100% identical to SEQ ID NO: 595. In another example, the anti-TfR scFv coding sequence is (or comprises a sequence) at least 99%, at least 99.5%, or 100% identical to SEQ ID NO: 595 and encodes an anti-TfR scFv protein (or an anti-TfR scFv protein comprising a sequence) at least 99%, at least 99.5%, or 100% identical to SEQ ID NO: 554. In another example, the anti-TfR scFv coding sequence is (or comprises a sequence) at least 99%, at least 99.5%, or 100% identical to SEQ ID NO: 595 and encodes an anti-TfR scFv protein comprising the sequence set forth in SEQ ID NO: 554. In another example, the anti-TfR scFv coding sequence comprises the sequence set forth in SEQ ID NO: 595. In another example, the anti-TfR scFv coding sequence consists essentially of the sequence set forth in SEQ ID NO: 595. In another example, the anti-TfR scFv coding sequence consists of the sequence set forth in SEQ ID NO: 595. The anti-TfR coding sequence can be, for example, CpG-depleted (e.g., fully CpG-depleted) and/or codon optimized. For example, the anti-TfR scFv coding sequence can be CpG depleted (e.g., fully CpG-depleted) and codon optimized. Optionally, the anti-TfR scFv coding sequence encodes an anti-TfR scFv protein (or an anti-TfR scFv protein comprising a sequence) at least 90%, at least 91%, at least 92%, at least 93%, at least 94%, at least 95%, at least 96%, at least 97%, at least 98%, at least 99%, at least 99.5%, or 100% identical to SEQ ID NO: 554 (and, e.g., retaining TfR-binding activity). Optionally, the anti-TfR scFv coding sequence encodes an anti-TfR scFv protein (or an anti-TfR scFv protein comprising a sequence) at least 95%, at least 96%, at least 97%, at least 98%, at least 99%, at least 99.5%, or 100% identical to SEQ ID NO: 554 (and, e.g., retaining TfR-binding activity). Optionally, the anti-TfR scFv coding sequence in the above examples encodes an anti-TfR scFv protein (or an anti-TfR scFv protein comprising a sequence) at least 99%, at least 99.5%, or 100% identical to SEQ ID NO: 554 (and, e.g., retaining TfR-binding activity). Optionally, the anti-TfR scFv coding sequence in the above examples encodes an anti-TfR scFv protein comprising the sequence set forth in SEQ ID NO: 554. Optionally, the anti-TfR scFv coding sequence in the above examples encodes an anti-TfR scFv protein consisting essentially of the sequence set forth in SEQ ID NO: 554. Optionally, the anti-TfR scFv coding sequence in the above examples encodes an anti-TfR scFv protein consisting of the sequence set forth in SEQ ID NO: 554.

[0362] Various codon optimized anti-TfR scFv coding sequences are provided. The anti-TfR scFv coding sequence can be, for example, CpG-depleted (e.g., fully CpG depleted) and/or codon optimized (e.g., CpG depleted (e.g., fully CpG-depleted) and codon optimized). In one example, the anti-TfR scFv coding sequence is (or comprises a sequence) at least 90%, at least 91%, at least 92%, at least 93%, at least 94%, at least 95%, at least 96%, at least 97%, at least 98%, at least 99%, at least 99.5%, or 100% identical to any one of SEQ ID NOS: 590-592. In another example, the anti-TfR scFv coding sequence is (or comprises a sequence) at least 95%, at least 96%, at least 97%, at least 98%, at least 99%, at least 99.5%, or 100% identical to any one of SEQ ID NOS: 590-592. In another example, the anti-TfR scFv coding sequence is (or comprises a sequence) at least 99%, at least 99.5%, or 100% identical to any one of SEQ ID NOS: 590-592. In another example, the anti-TfR scFv coding sequence comprises the sequence set forth in any one of SEQ ID NOS: 590-592. In another example, the anti-TfR scFv coding sequence consists essentially of the sequence set forth in any one of SEQ ID NOS: 590-592. In another example, the anti-TfR scFv coding sequence consists of the sequence set forth in any one of SEQ ID NOS: 590-592. Optionally, the anti-TfR scFv coding sequence encodes an anti-TfR scFv protein (or an anti-TfR scFv protein comprising a sequence) at least 90%, at least 91%, at least 92%, at least 93%, at least 94%, at least 95%, at least 96%, at least 97%, at least 98%, at least 99%, at least 99.5%, or 100% identical to SEQ ID NO: 551 (and, e.g., retaining TfR-binding activity). Optionally, the anti-TfR scFv coding sequence encodes an anti-TfR scFv protein (or an anti-TfR scFv protein comprising a sequence) at least 95%, at least 96%, at least 97%, at least 98%, at least 99%, at least 99.5%, or 100% identical to SEQ ID NO: 551 (and, e.g., retaining TfR-binding activity). Optionally, the anti-TfR scFv coding sequence in the above examples encodes an anti-TfR scFv protein (or an anti-TfR scFv protein comprising a sequence) at least 99%, at least 99.5%, or 100% identical to SEQ ID NO: 551 (and, e.g., retaining TfR-binding activity). Optionally, the anti-TfR scFv coding sequence in the above examples encodes an anti-TfR scFv protein comprising the sequence set forth in SEQ ID NO: 551. Optionally, the anti-TfR scFv coding sequence in the above examples encodes an anti-TfR scFv protein consisting essentially of the sequence set forth in SEQ ID NO: 551. Optionally, the anti-TfR scFv coding sequence in the above examples encodes an anti-TfR scFv protein consisting of the sequence set forth in SEQ ID NO: 551.

[0363] In one example, the anti-TfR scFv coding sequence is (or comprises a sequence) at least 90%, at least 91%, at least 92%, at least 93%, at least 94%, at least 95%, at least 96%, at least 97%, at least 98%, at least 99%, at least 99.5%, or 100% identical to SEQ ID NO: 590. In another example, the anti-TfR scFv coding sequence is (or comprises a sequence) at least 90%, at least 91%, at least 92%, at least 93%, at least 94%, at least 95%, at least 96%, at least 97%, at least 98%, at least 99%, at least 99.5%, or 100% identical to SEQ ID NO: 590 and encodes an anti-TfR scFv protein (or an anti-TfR scFv protein comprising a sequence) at least 99%, at least 99.5%, or 100% identical to SEQ ID NO: 551. In another example, the anti-TfR scFv coding sequence is (or comprises a sequence) at least 90%, at least 91%, at least 92%, at least 93%, at least 94%, at least 95%, at least 96%, at least 97%, at least 98%, at least 99%, at least 99.5%, or 100% identical to SEQ ID NO: 590 and encodes an anti-TfR scFv protein comprising the sequence set forth in SEQ ID NO: 551. In another example, the anti-TfR scFv coding sequence is (or comprises a sequence) at least 95%, at least 96%, at least 97%, at least 98%, at least 99%, at least 99.5%, or 100% identical to SEQ ID NO: 590. In another example, the anti-TfR scFv coding sequence is (or comprises a sequence) at least 95%, at least 96%, at least 97%, at least 98%, at least 99%, at least 99.5%, or 100% identical to SEQ ID NO: 590 and encodes an anti-TfR scFv protein (or an anti-TfR scFv protein comprising a sequence) at least 99%, at least 99.5%, or 100% identical to SEQ ID NO: 551. In another example, the anti-TfR scFv coding sequence is (or comprises a sequence) at least 95%, at least 96%, at least 97%, at least 98%, at least 99%, at least 99.5%, or 100% identical to SEQ ID NO: 590 and encodes an anti-TfR scFv protein comprising the sequence set forth in SEQ ID NO: 551. In another example, the anti-TfR scFv coding sequence is (or comprises a sequence) at least 99%, at least 99.5%, or 100% identical to SEQ ID NO: 590. In another example, the anti-TfR scFv coding sequence is (or comprises a sequence) at least 99%, at least 99.5%, or 100% identical to SEQ ID NO: 590 and encodes an anti-TfR scFv protein (or an anti-TfR scFv protein comprising a sequence) at least 99%, at least 99.5%, or 100% identical to SEQ ID NO: 551. In another example, the anti-TfR scFv coding sequence is (or comprises a sequence) at least 99%, at least 99.5%, or 100% identical to SEQ ID NO: 590 and encodes an anti-TfR scFv protein comprising the sequence set forth in SEQ ID NO: 551. In another example, the anti-TfR scFv coding sequence comprises the sequence set forth in SEQ ID NO: 590. In another example, the anti-TfR scFv coding sequence consists essentially of the sequence set forth in SEQ ID NO: 590. In another example, the anti-TfR scFv coding sequence consists of the sequence set forth in SEQ ID NO: 590. The anti-TfR coding sequence can be, for example, CpG-depleted (e.g., fully CpG-depleted) and/or codon optimized. For example, the anti-TfR scFv coding sequence can be CpG depleted (e.g., fully CpG-depleted) and codon optimized. Optionally, the anti-TfR scFv coding sequence encodes an anti-TfR scFv protein (or an anti-TfR scFv protein comprising a sequence) at least 90%, at least 91%, at least 92%, at least 93%, at least 94%, at least 95%, at least 96%, at least 97%, at least 98%, at least 99%, at least 99.5%, or 100% identical to SEQ ID NO: 551 (and, e.g., retaining TfR-binding activity). Optionally, the anti-TfR scFv coding sequence encodes an anti-TfR scFv protein (or an anti-TfR scFv protein comprising a sequence) at least 95%, at least 96%, at least 97%, at least 98%, at least 99%, at least 99.5%, or 100% identical to SEQ ID NO: 551 (and, e.g., retaining TfR-binding activity). Optionally, the anti-TfR scFv coding sequence in the above examples encodes an anti-TfR scFv protein (or an anti-TfR scFv protein comprising a sequence) at least 99%, at least 99.5%, or 100% identical to SEQ ID NO: 551 (and, e.g., retaining TfR-binding activity). Optionally, the anti-TfR scFv coding sequence in the above examples encodes an anti-TfR scFv protein comprising the sequence set forth in SEQ ID NO: 551. Optionally, the anti-TfR scFv coding sequence in the above examples encodes an anti-TfR scFv protein consisting essentially of the sequence set forth in SEQ ID NO: 551. Optionally, the anti-TfR scFv coding sequence in the above examples encodes an anti-TfR scFv protein consisting of the sequence set forth in SEQ ID NO: 551.

[0364] In one example, the anti-TfR scFv coding sequence is (or comprises a sequence) at least 90%, at least 91%, at least 92%, at least 93%, at least 94%, at least 95%, at least 96%, at least 97%, at least 98%, at least 99%, at least 99.5%, or 100% identical to SEQ ID NO: 591. In another example, the anti-TfR scFv coding sequence is (or comprises a sequence) at least 90%, at least 91%, at least 92%, at least 93%, at least 94%, at least 95%, at least 96%, at least 97%, at least 98%, at least 99%, at least 99.5%, or 100% identical to SEQ ID NO: 591 and encodes an anti-TfR scFv protein (or an anti-TfR scFv protein comprising a sequence) at least 99%, at least 99.5%, or 100% identical to SEQ ID NO: 551. In another example, the anti-TfR scFv coding sequence is (or comprises a sequence) at least 90%, at least 91%, at least 92%, at least 93%, at least 94%, at least 95%, at least 96%, at least 97%, at least 98%, at least 99%, at least 99.5%, or 100% identical to SEQ ID NO: 591 and encodes an anti-TfR scFv protein comprising the sequence set forth in SEQ ID NO: 551. In another example, the anti-TfR scFv coding sequence is (or comprises a sequence) at least 95%, at least 96%, at least 97%, at least 98%, at least 99%, at least 99.5%, or 100% identical to SEQ ID NO: 591. In another example, the anti-TfR scFv coding sequence is (or comprises a sequence) at least 95%, at least 96%, at least 97%, at least 98%, at least 99%, at least 99.5%, or 100% identical to SEQ ID NO: 591 and encodes an anti-TfR scFv protein (or an anti-TfR scFv protein comprising a sequence) at least 99%, at least 99.5%, or 100% identical to SEQ ID NO: 551. In another example, the anti-TfR scFv coding sequence is (or comprises a sequence) at least 95%, at least 96%, at least 97%, at least 98%, at least 99%, at least 99.5%, or 100% identical to SEQ ID NO: 591 and encodes an anti-TfR scFv protein comprising the sequence set forth in SEQ ID NO: 551. In another example, the anti-TfR scFv coding sequence is (or comprises a sequence) at least 99%, at least 99.5%, or 100% identical to SEQ ID NO: 591. In another example, the anti-TfR scFv coding sequence is (or comprises a sequence) at least 99%, at least 99.5%, or 100% identical to SEQ ID NO: 591 and encodes an anti-TfR scFv protein (or an anti-TfR scFv protein comprising a sequence) at least 99%, at least 99.5%, or 100% identical to SEQ ID NO: 551. In another example, the anti-TfR scFv coding sequence is (or comprises a sequence) at least 99%, at least 99.5%, or 100% identical to SEQ ID NO: 591 and encodes an anti-TfR scFv protein comprising the sequence set forth in SEQ ID NO: 551. In another example, the anti-TfR scFv coding sequence comprises the sequence set forth in SEQ ID NO: 591. In another example, the anti-TfR scFv coding sequence consists essentially of the sequence set forth in SEQ ID NO: 591. In another example, the anti-TfR scFv coding sequence consists of the sequence set forth in SEQ ID NO: 591. The anti-TfR coding sequence can be, for example, CpG-depleted (e.g., fully CpG-depleted) and/or codon optimized. For example, the anti-TfR scFv coding sequence can be CpG depleted (e.g., fully CpG-depleted) and codon optimized. Optionally, the anti-TfR scFv coding sequence encodes an anti-TfR scFv protein (or an anti-TfR scFv protein comprising a sequence) at least 90%, at least 91%, at least 92%, at least 93%, at least 94%, at least 95%, at least 96%, at least 97%, at least 98%, at least 99%, at least 99.5%, or 100% identical to SEQ ID NO: 551 (and, e.g., retaining TfR-binding activity). Optionally, the anti-TfR scFv coding sequence encodes an anti-TfR scFv protein (or an anti-TfR scFv protein comprising a sequence) at least 95%, at least 96%, at least 97%, at least 98%, at least 99%, at least 99.5%, or 100% identical to SEQ ID NO: 551 (and, e.g., retaining TfR-binding activity). Optionally, the anti-TfR scFv coding sequence in the above examples encodes an anti-TfR scFv protein (or an anti-TfR scFv protein comprising a sequence) at least 99%, at least 99.5%, or 100% identical to SEQ ID NO: 551 (and, e.g., retaining TfR-binding activity). Optionally, the anti-TfR scFv coding sequence in the above examples encodes an anti-TfR scFv protein comprising the sequence set forth in SEQ ID NO: 551. Optionally, the anti-TfR scFv coding sequence in the above examples encodes an anti-TfR scFv protein consisting essentially of the sequence set forth in SEQ ID NO: 551. Optionally, the anti-TfR scFv coding sequence in the above examples encodes an anti-TfR scFv protein consisting of the sequence set forth in SEQ ID NO: 551.

[0365] In one example, the anti-TfR scFv coding sequence is (or comprises a sequence) at least 90%, at least 91%, at least 92%, at least 93%, at least 94%, at least 95%, at least 96%, at least 97%, at least 98%, at least 99%, at least 99.5%, or 100% identical to SEQ ID NO: 592. In another example, the anti-TfR scFv coding sequence is (or comprises a sequence) at least 90%, at least 91%, at least 92%, at least 93%, at least 94%, at least 95%, at least 96%, at least 97%, at least 98%, at least 99%, at least 99.5%, or 100% identical to SEQ ID NO: 592 and encodes an anti-TfR scFv protein (or an anti-TfR scFv protein comprising a sequence) at least 99%, at least 99.5%, or 100% identical to SEQ ID NO: 551. In another example, the anti-TfR scFv coding sequence is (or comprises a sequence) at least 90%, at least 91%, at least 92%, at least 93%, at least 94%, at least 95%, at least 96%, at least 97%, at least 98%, at least 99%, at least 99.5%, or 100% identical to SEQ ID NO: 592 and encodes an anti-TfR scFv protein comprising the sequence set forth in SEQ ID NO: 551. In another example, the anti-TfR scFv coding sequence is (or comprises a sequence) at least 95%, at least 96%, at least 97%, at least 98%, at least 99%, at least 99.5%, or 100% identical to SEQ ID NO: 592. In another example, the anti-TfR scFv coding sequence is (or comprises a sequence) at least 95%, at least 96%, at least 97%, at least 98%, at least 99%, at least 99.5%, or 100% identical to SEQ ID NO: 592 and encodes an anti-TfR scFv protein (or an anti-TfR scFv protein comprising a sequence) at least 99%, at least 99.5%, or 100% identical to SEQ ID NO: 551. In another example, the anti-TfR scFv coding sequence is (or comprises a sequence) at least 95%, at least 96%, at least 97%, at least 98%, at least 99%, at least 99.5%, or 100% identical to SEQ ID NO: 592 and encodes an anti-TfR scFv protein comprising the sequence set forth in SEQ ID NO: 551. In another example, the anti-TfR scFv coding sequence is (or comprises a sequence) at least 99%, at least 99.5%, or 100% identical to SEQ ID NO: 592. In another example, the anti-TfR scFv coding sequence is (or comprises a sequence) at least 99%, at least 99.5%, or 100% identical to SEQ ID NO: 592 and encodes an anti-TfR scFv protein (or an anti-TfR scFv protein comprising a sequence) at least 99%, at least 99.5%, or 100% identical to SEQ ID NO: 551. In another example, the anti-TfR scFv coding sequence is (or comprises a sequence) at least 99%, at least 99.5%, or 100% identical to SEQ ID NO: 592 and encodes an anti-TfR scFv protein comprising the sequence set forth in SEQ ID NO: 551. In another example, the anti-TfR scFv coding sequence comprises the sequence set forth in SEQ ID NO: 592. In another example, the anti-TfR scFv coding sequence consists essentially of the sequence set forth in SEQ ID NO: 592. In another example, the anti-TfR scFv coding sequence consists of the sequence set forth in SEQ ID NO: 592. The anti-TfR coding sequence can be, for example, CpG-depleted (e.g., fully CpG-depleted) and/or codon optimized. For example, the anti-TfR scFv coding sequence can be CpG depleted (e.g., fully CpG-depleted) and codon optimized. Optionally, the anti-TfR scFv coding sequence encodes an anti-TfR scFv protein (or an anti-TfR scFv protein comprising a sequence) at least 90%, at least 91%, at least 92%, at least 93%, at least 94%, at least 95%, at least 96%, at least 97%, at least 98%, at least 99%, at least 99.5%, or 100% identical to SEQ ID NO: 551 (and, e.g., retaining TfR-binding activity). Optionally, the anti-TfR scFv coding sequence encodes an anti-TfR scFv protein (or an anti-TfR scFv protein comprising a sequence) at least 95%, at least 96%, at least 97%, at least 98%, at least 99%, at least 99.5%, or 100% identical to SEQ ID NO: 551 (and, e.g., retaining TfR-binding activity). Optionally, the anti-TfR scFv coding sequence in the above examples encodes an anti-TfR scFv protein (or an anti-TfR scFv protein comprising a sequence) at least 99%, at least 99.5%, or 100% identical to SEQ ID NO: 551 (and, e.g., retaining TfR-binding activity). Optionally, the anti-TfR scFv coding sequence in the above examples encodes an anti-TfR scFv protein comprising the sequence set forth in SEQ ID NO: 551. Optionally, the anti-TfR scFv coding sequence in the above examples encodes an anti-TfR scFv protein consisting essentially of the sequence set forth in SEQ ID NO: 551. Optionally, the anti-TfR scFv coding sequence in the above examples encodes an anti-TfR scFv protein consisting of the sequence set forth in SEQ ID NO: 551.

[0366] Various codon optimized anti-TfR scFv coding sequences are provided. The anti-TfR scFv coding sequence can be, for example, CpG-depleted (e.g., fully CpG depleted) and/or codon optimized (e.g., CpG depleted (e.g., fully CpG-depleted) and codon optimized). In one example, the anti-TfR scFv coding sequence is (or comprises a sequence) at least 90%, at least 91%, at least 92%, at least 93%, at least 94%, at least 95%, at least 96%, at least 97%, at least 98%, at least 99%, at least 99.5%, or 100% identical to any one of SEQ ID NOS: 587-589. In another example, the anti-TfR scFv coding sequence is (or comprises a sequence) at least 95%, at least 96%, at least 97%, at least 98%, at least 99%, at least 99.5%, or 100% identical to any one of SEQ ID NOS: 587-589. In another example, the anti-TfR scFv coding sequence is (or comprises a sequence) at least 99%, at least 99.5%, or 100% identical to any one of SEQ ID NOS: 587-589. In another example, the anti-TfR scFv coding sequence comprises the sequence set forth in any one of SEQ ID NOS: 587-589. In another example, the anti-TfR scFv coding sequence consists essentially of the sequence set forth in any one of SEQ ID NOS: 587-589. In another example, the anti-TfR scFv coding sequence consists of the sequence set forth in any one of SEQ ID NOS: 587-589. Optionally, the anti-TfR scFv coding sequence encodes an anti-TfR scFv protein (or an anti-TfR scFv protein comprising a sequence) at least 90%, at least 91%, at least 92%, at least 93%, at least 94%, at least 95%, at least 96%, at least 97%, at least 98%, at least 99%, at least 99.5%, or 100% identical to SEQ ID NO: 540 (and, e.g., retaining TfR-binding activity). Optionally, the anti-TfR scFv coding sequence encodes an anti-TfR scFv protein (or an anti-TfR scFv protein comprising a sequence) at least 95%, at least 96%, at least 97%, at least 98%, at least 99%, at least 99.5%, or 100% identical to SEQ ID NO: 540 (and, e.g., retaining TfR-binding activity). Optionally, the anti-TfR scFv coding sequence in the above examples encodes an anti-TfR scFv protein (or an anti-TfR scFv protein comprising a sequence) at least 99%, at least 99.5%, or 100% identical to SEQ ID NO: 540 (and, e.g., retaining TfR-binding activity). Optionally, the anti-TfR scFv coding sequence in the above examples encodes an anti-TfR scFv protein comprising the sequence set forth in SEQ ID NO: 540. Optionally, the anti-TfR scFv coding sequence in the above examples encodes an anti-TfR scFv protein consisting essentially of the sequence set forth in SEQ ID NO: 540. Optionally, the anti-TfR scFv coding sequence in the above examples encodes an anti-TfR scFv protein consisting of the sequence set forth in SEQ ID NO: 540.

[0367] In one example, the anti-TfR scFv coding sequence is (or comprises a sequence) at least 90%, at least 91%, at least 92%, at least 93%, at least 94%, at least 95%, at least 96%, at least 97%, at least 98%, at least 99%, at least 99.5%, or 100% identical to SEQ ID NO: 587. In another example, the anti-TfR scFv coding sequence is (or comprises a sequence) at least 90%, at least 91%, at least 92%, at least 93%, at least 94%, at least 95%, at least 96%, at least 97%, at least 98%, at least 99%, at least 99.5%, or 100% identical to SEQ ID NO: 587 and encodes an anti-TfR scFv protein (or an anti-TfR scFv protein comprising a sequence) at least 99%, at least 99.5%, or 100% identical to SEQ ID NO: 540. In another example, the anti-TfR scFv coding sequence is (or comprises a sequence) at least 90%, at least 91%, at least 92%, at least 93%, at least 94%, at least 95%, at least 96%, at least 97%, at least 98%, at least 99%, at least 99.5%, or 100% identical to SEQ ID NO: 587 and encodes an anti-TfR scFv protein comprising the sequence set forth in SEQ ID NO: 540. In another example, the anti-TfR scFv coding sequence is (or comprises a sequence) at least 95%, at least 96%, at least 97%, at least 98%, at least 99%, at least 99.5%, or 100% identical to SEQ ID NO: 587. In another example, the anti-TfR scFv coding sequence is (or comprises a sequence) at least 95%, at least 96%, at least 97%, at least 98%, at least 99%, at least 99.5%, or 100% identical to SEQ ID NO: 587 and encodes an anti-TfR scFv protein (or an anti-TfR scFv protein comprising a sequence) at least 99%, at least 99.5%, or 100% identical to SEQ ID NO: 540. In another example, the anti-TfR scFv coding sequence is (or comprises a sequence) at least 95%, at least 96%, at least 97%, at least 98%, at least 99%, at least 99.5%, or 100% identical to SEQ ID NO: 587 and encodes an anti-TfR scFv protein comprising the sequence set forth in SEQ ID NO: 540. In another example, the anti-TfR scFv coding sequence is (or comprises a sequence) at least 99%, at least 99.5%, or 100% identical to SEQ ID NO: 587. In another example, the anti-TfR scFv coding sequence is (or comprises a sequence) at least 99%, at least 99.5%, or 100% identical to SEQ ID NO: 587 and encodes an anti-TfR scFv protein (or an anti-TfR scFv protein comprising a sequence) at least 99%, at least 99.5%, or 100% identical to SEQ ID NO: 540. In another example, the anti-TfR scFv coding sequence is (or comprises a sequence) at least 99%, at least 99.5%, or 100% identical to SEQ ID NO: 587 and encodes an anti-TfR scFv protein comprising the sequence set forth in SEQ ID NO: 540. In another example, the anti-TfR scFv coding sequence comprises the sequence set forth in SEQ ID NO: 587. In another example, the anti-TfR scFv coding sequence consists essentially of the sequence set forth in SEQ ID NO: 587. In another example, the anti-TfR scFv coding sequence consists of the sequence set forth in SEQ ID NO: 587. The anti-TfR coding sequence can be, for example, CpG-depleted (e.g., fully CpG-depleted) and/or codon optimized. For example, the anti-TfR scFv coding sequence can be CpG depleted (e.g., fully CpG-depleted) and codon optimized. Optionally, the anti-TfR scFv coding sequence encodes an anti-TfR scFv protein (or an anti-TfR scFv protein comprising a sequence) at least 90%, at least 91%, at least 92%, at least 93%, at least 94%, at least 95%, at least 96%, at least 97%, at least 98%, at least 99%, at least 99.5%, or 100% identical to SEQ ID NO: 540 (and, e.g., retaining TfR-binding activity). Optionally, the anti-TfR scFv coding sequence encodes an anti-TfR scFv protein (or an anti-TfR scFv protein comprising a sequence) at least 95%, at least 96%, at least 97%, at least 98%, at least 99%, at least 99.5%, or 100% identical to SEQ ID NO: 540 (and, e.g., retaining TfR-binding activity). Optionally, the anti-TfR scFv coding sequence in the above examples encodes an anti-TfR scFv protein (or an anti-TfR scFv protein comprising a sequence) at least 99%, at least 99.5%, or 100% identical to SEQ ID NO: 540 (and, e.g., retaining TfR-binding activity). Optionally, the anti-TfR scFv coding sequence in the above examples encodes an anti-TfR scFv protein comprising the sequence set forth in SEQ ID NO: 540. Optionally, the anti-TfR scFv coding sequence in the above examples encodes an anti-TfR scFv protein consisting essentially of the sequence set forth in SEQ ID NO: 540. Optionally, the anti-TfR scFv coding sequence in the above examples encodes an anti-TfR scFv protein consisting of the sequence set forth in SEQ ID NO: 540.

[0368] In one example, the anti-TfR scFv coding sequence is (or comprises a sequence) at least 90%, at least 91%, at least 92%, at least 93%, at least 94%, at least 95%, at least 96%, at least 97%, at least 98%, at least 99%, at least 99.5%, or 100% identical to SEQ ID NO: 588. In another example, the anti-TfR scFv coding sequence is (or comprises a sequence) at least 90%, at least 91%, at least 92%, at least 93%, at least 94%, at least 95%, at least 96%, at least 97%, at least 98%, at least 99%, at least 99.5%, or 100% identical to SEQ ID NO: 588 and encodes an anti-TfR scFv protein (or an anti-TfR scFv protein comprising a sequence) at least 99%, at least 99.5%, or 100% identical to SEQ ID NO: 540. In another example, the anti-TfR scFv coding sequence is (or comprises a sequence) at least 90%, at least 91%, at least 92%, at least 93%, at least 94%, at least 95%, at least 96%, at least 97%, at least 98%, at least 99%, at least 99.5%, or 100% identical to SEQ ID NO: 588 and encodes an anti-TfR scFv protein comprising the sequence set forth in SEQ ID NO: 540. In another example, the anti-TfR scFv coding sequence is (or comprises a sequence) at least 95%, at least 96%, at least 97%, at least 98%, at least 99%, at least 99.5%, or 100% identical to SEQ ID NO: 588. In another example, the anti-TfR scFv coding sequence is (or comprises a sequence) at least 95%, at least 96%, at least 97%, at least 98%, at least 99%, at least 99.5%, or 100% identical to SEQ ID NO: 588 and encodes an anti-TfR scFv protein (or an anti-TfR scFv protein comprising a sequence) at least 99%, at least 99.5%, or 100% identical to SEQ ID NO: 540. In another example, the anti-TfR scFv coding sequence is (or comprises a sequence) at least 95%, at least 96%, at least 97%, at least 98%, at least 99%, at least 99.5%, or 100% identical to SEQ ID NO: 588 and encodes an anti-TfR scFv protein comprising the sequence set forth in SEQ ID NO: 540. In another example, the anti-TfR scFv coding sequence is (or comprises a sequence) at least 99%, at least 99.5%, or 100% identical to SEQ ID NO: 588. In another example, the anti-TfR scFv coding sequence is (or comprises a sequence) at least 99%, at least 99.5%, or 100% identical to SEQ ID NO: 588 and encodes an anti-TfR scFv protein (or an anti-TfR scFv protein comprising a sequence) at least 99%, at least 99.5%, or 100% identical to SEQ ID NO: 540. In another example, the anti-TfR scFv coding sequence is (or comprises a sequence) at least 99%, at least 99.5%, or 100% identical to SEQ ID NO: 588 and encodes an anti-TfR scFv protein comprising the sequence set forth in SEQ ID NO: 540. In another example, the anti-TfR scFv coding sequence comprises the sequence set forth in SEQ ID NO: 588. In another example, the anti-TfR scFv coding sequence consists essentially of the sequence set forth in SEQ ID NO: 588. In another example, the anti-TfR scFv coding sequence consists of the sequence set forth in SEQ ID NO: 588. The anti-TfR coding sequence can be, for example, CpG-depleted (e.g., fully CpG-depleted) and/or codon optimized. For example, the anti-TfR scFv coding sequence can be CpG depleted (e.g., fully CpG-depleted) and codon optimized. Optionally, the anti-TfR scFv coding sequence encodes an anti-TfR scFv protein (or an anti-TfR scFv protein comprising a sequence) at least 90%, at least 91%, at least 92%, at least 93%, at least 94%, at least 95%, at least 96%, at least 97%, at least 98%, at least 99%, at least 99.5%, or 100% identical to SEQ ID NO: 540 (and, e.g., retaining TfR-binding activity). Optionally, the anti-TfR scFv coding sequence encodes an anti-TfR scFv protein (or an anti-TfR scFv protein comprising a sequence) at least 95%, at least 96%, at least 97%, at least 98%, at least 99%, at least 99.5%, or 100% identical to SEQ ID NO: 540 (and, e.g., retaining TfR-binding activity). Optionally, the anti-TfR scFv coding sequence in the above examples encodes an anti-TfR scFv protein (or an anti-TfR scFv protein comprising a sequence) at least 99%, at least 99.5%, or 100% identical to SEQ ID NO: 540 (and, e.g., retaining TfR-binding activity). Optionally, the anti-TfR scFv coding sequence in the above examples encodes an anti-TfR scFv protein comprising the sequence set forth in SEQ ID NO: 540. Optionally, the anti-TfR scFv coding sequence in the above examples encodes an anti-TfR scFv protein consisting essentially of the sequence set forth in SEQ ID NO: 540. Optionally, the anti-TfR scFv coding sequence in the above examples encodes an anti-TfR scFv protein consisting of the sequence set forth in SEQ ID NO: 540.

[0369] In one example, the anti-TfR scFv coding sequence is (or comprises a sequence) at least 90%, at least 91%, at least 92%, at least 93%, at least 94%, at least 95%, at least 96%, at least 97%, at least 98%, at least 99%, at least 99.5%, or 100% identical to SEQ ID NO: 589. In another example, the anti-TfR scFv coding sequence is (or comprises a sequence) at least 90%, at least 91%, at least 92%, at least 93%, at least 94%, at least 95%, at least 96%, at least 97%, at least 98%, at least 99%, at least 99.5%, or 100% identical to SEQ ID NO: 589 and encodes an anti-TfR scFv protein (or an anti-TfR scFv protein comprising a sequence) at least 99%, at least 99.5%, or 100% identical to SEQ ID NO: 540. In another example, the anti-TfR scFv coding sequence is (or comprises a sequence) at least 90%, at least 91%, at least 92%, at least 93%, at least 94%, at least 95%, at least 96%, at least 97%, at least 98%, at least 99%, at least 99.5%, or 100% identical to SEQ ID NO: 589 and encodes an anti-TfR scFv protein comprising the sequence set forth in SEQ ID NO: 540. In another example, the anti-TfR scFv coding sequence is (or comprises a sequence) at least 95%, at least 96%, at least 97%, at least 98%, at least 99%, at least 99.5%, or 100% identical to SEQ ID NO: 589. In another example, the anti-TfR scFv coding sequence is (or comprises a sequence) at least 95%, at least 96%, at least 97%, at least 98%, at least 99%, at least 99.5%, or 100% identical to SEQ ID NO: 589 and encodes an anti-TfR scFv protein (or an anti-TfR scFv protein comprising a sequence) at least 99%, at least 99.5%, or 100% identical to SEQ ID NO: 540. In another example, the anti-TfR scFv coding sequence is (or comprises a sequence) at least 95%, at least 96%, at least 97%, at least 98%, at least 99%, at least 99.5%, or 100% identical to SEQ ID NO: 589 and encodes an anti-TfR scFv protein comprising the sequence set forth in SEQ ID NO: 540. In another example, the anti-TfR scFv coding sequence is (or comprises a sequence) at least 99%, at least 99.5%, or 100% identical to SEQ ID NO: 589. In another example, the anti-TfR scFv coding sequence is (or comprises a sequence) at least 99%, at least 99.5%, or 100% identical to SEQ ID NO: 589 and encodes an anti-TfR scFv protein (or an anti-TfR scFv protein comprising a sequence) at least 99%, at least 99.5%, or 100% identical to SEQ ID NO: 540. In another example, the anti-TfR scFv coding sequence is (or comprises a sequence) at least 99%, at least 99.5%, or 100% identical to SEQ ID NO: 589 and encodes an anti-TfR scFv protein comprising the sequence set forth in SEQ ID NO: 540. In another example, the anti-TfR scFv coding sequence comprises the sequence set forth in SEQ ID NO: 589. In another example, the anti-TfR scFv coding sequence consists essentially of the sequence set forth in SEQ ID NO: 589. In another example, the anti-TfR scFv coding sequence consists of the sequence set forth in SEQ ID NO: 589. The anti-TfR coding sequence can be, for example, CpG-depleted (e.g., fully CpG-depleted) and/or codon optimized. For example, the anti-TfR scFv coding sequence can be CpG depleted (e.g., fully CpG-depleted) and codon optimized. Optionally, the anti-TfR scFv coding sequence encodes an anti-TfR scFv protein (or an anti-TfR scFv protein comprising a sequence) at least 90%, at least 91%, at least 92%, at least 93%, at least 94%, at least 95%, at least 96%, at least 97%, at least 98%, at least 99%, at least 99.5%, or 100% identical to SEQ ID NO: 540 (and, e.g., retaining TfR-binding activity). Optionally, the anti-TfR scFv coding sequence encodes an anti-TfR scFv protein (or an anti-TfR scFv protein comprising a sequence) at least 95%, at least 96%, at least 97%, at least 98%, at least 99%, at least 99.5%, or 100% identical to SEQ ID NO: 540 (and, e.g., retaining TfR-binding activity). Optionally, the anti-TfR scFv coding sequence in the above examples encodes an anti-TfR scFv protein (or an anti-TfR scFv protein comprising a sequence) at least 99%, at least 99.5%, or 100% identical to SEQ ID NO: 540 (and, e.g., retaining TfR-binding activity). Optionally, the anti-TfR scFv coding sequence in the above examples encodes an anti-TfR scFv protein comprising the sequence set forth in SEQ ID NO: 540. Optionally, the anti-TfR scFv coding sequence in the above examples encodes an anti-TfR scFv protein consisting essentially of the sequence set forth in SEQ ID NO: 540. Optionally, the anti-TfR scFv coding sequence in the above examples encodes an anti-TfR scFv protein consisting of the sequence set forth in SEQ ID NO: 540.

[0370] When specific anti-TfR scFv or multidomain therapeutic protein nucleic acid constructs sequences are disclosed herein, they are meant to encompass the sequence disclosed or the reverse complement of the sequence. For example, if an anti-TfR scFv or multidomain therapeutic protein nucleic acid construct disclosed herein consists of the hypothetical sequence 5′-CTGGACCGA-3′, it is also meant to encompass the reverse complement of that sequence (5′-TCGGTCCAG-3′). Likewise, when construct elements are disclosed herein in a specific 5′ to 3′ order, they are also meant to encompass the reverse complement of the order of those elements. One reason for this is that, in many embodiments disclosed herein, the anti-TfR scFv or multidomain therapeutic protein nucleic acid constructs are part of a single-stranded recombinant AAV vector. Single-stranded AAV genomes are packaged as either sense (plus-stranded) or anti-sense (minus-stranded genomes), and single-stranded AAV genomes of + and -polarity are packaged with equal frequency into mature rAAV virions. See, e.g., LING et al. (2015) J. Mol. Genet. Med. 9(3):175, Zhou et al. (2008) Mol. Ther. 16(3):494-499, and Samulski et al. (1987) J. Virol. 61:3096-3101, each of which is herein incorporated by reference in its entirety for all purposes.

### Bidirectional Constructs

[0371] The nucleic acid constructs disclosed herein can be bidirectional constructs. Such bidirectional constructs can allow for enhanced insertion and expression of encoded polypeptide of interest. When used in combination with a nuclease agent (e.g., CRISPR/Cas system, zinc finger nuclease (ZFN) system; transcription activator-like effector nuclease (TALEN) system) as described herein, the bidirectionality of the nucleic acid construct allows the construct to be inserted in either direction (i.e., is not limited to insertion in one direction) within a target genomic locus or a cleavage site or target insertion site, allowing the expression of the polypeptide of interest when inserted in either orientation, thereby enhancing expression efficiency.

[0372] A bidirectional construct as disclosed herein can comprise at least two nucleic acid segments, wherein a first segment comprises a first coding sequence for the polypeptide of interest, and a second segment comprises the reverse complement of a second coding sequence for the polypeptide of interest, or vice versa. However, other bidirectional constructs disclosed herein can comprise at least two nucleic acid segments, wherein the first segment comprises a coding sequence for a polypeptide of interest, and the second segment comprises the reverse complement of a coding sequence for another protein, or vice versa. A reverse complement refers to a sequence that is a complement sequence of a reference sequence, wherein the complement sequence is written in the reverse orientation. For example, for a hypothetical sequence 5′-CTGGACCGA-3′, the perfect complement sequence is 3′-GACCTGGCT-5′, and the perfect reverse complement is written 5′-TCGGTCCAG-3′. A reverse complement sequence need not be perfect and may still encode the same polypeptide or a similar polypeptide as the reference sequence. Due to codon usage redundancy, a reverse complement can diverge from a reference sequence that encodes the same polypeptide. The coding sequences can optionally comprise one or more additional sequences, such as sequences encoding amino- or carboxy-terminal amino acid sequences such as a signal sequence, label sequence (e.g., HiBit), or heterologous functional sequence (e.g., nuclear localization sequence (NLS) or self-cleaving peptide) linked to the polypeptide of interest or other protein.

[0373] When specific bidirectional construct sequences are disclosed herein, they are meant to encompass the sequence disclosed or the reverse complement of the sequence. For example, if a bidirectional construct disclosed herein consists of the hypothetical sequence 5′-CTGGACCGA-3′, it is also meant to encompass the reverse complement of that sequence (5′-TCGGTCCAG-3′). Likewise, when bidirectional construct elements are disclosed herein in a specific 5′ to 3′ order, they are also meant to encompass the reverse complement of the order of those elements. For example, if a bidirectional construct is disclosed herein that comprises from 5′ to 3′ a first splice acceptor, a first coding sequence, a first terminator, a reverse complement of a second terminator, a reverse complement of a second coding sequence, and a reverse complement of a second splice acceptor, it is also meant to encompass a construct comprising from 5′ to 3′ the second splice acceptor, the second coding sequence, the second terminator, a reverse complement of the first terminator, a reverse complement of the first coding sequence, and a reverse complement of the first splice acceptor. One reason for this is that, in many embodiments disclosed herein, the bidirectional constructs are part of a single-stranded recombinant AAV vector. Single-stranded AAV genomes are packaged as either sense (plus-stranded) or anti-sense (minus-stranded genomes), and single-stranded AAV genomes of + and -polarity are packaged with equal frequency into mature rAAV virions. See, e.g., LING et al. (2015) J. Mol. Genet. Med. 9(3):175, Zhou et al. (2008) Mol. Ther. 16(3):494-499, and Samulski et al. (1987) J. Virol. 61:3096-3101, each of which is herein incorporated by reference in its entirety for all purposes.

[0374] When the at least two segments both encode a polypeptide of interest, the at least two segments can encode the same polypeptide of interest or different polypeptides of interest. The different polypeptides of interest can be at least about 90%, at least about 95%, at least about 96%, at least about 97%, at least about 98%, at least about 99%, or at least about 99.5% identical. For example, the first segment can encode a wild type polypeptide of interest or fragment thereof, and the second segment can encode a variant of the polypeptide of interest or fragment thereof, or vice versa. Alternatively, the first segment can encode a first variant polypeptide of interest, and the second segment can encode a second variant polypeptide of interest that is different from the first variant polypeptide of interest. Preferably, the two segments encode the same polypeptide of interest (i.e., 100% identical).

[0375] Even when the two segments encode the same polypeptide of interest, the coding sequence for the polypeptide of interest in the first segment can differ from the coding sequence for the polypeptide of interest in the second segment. In some bidirectional constructs, the codon usage in the first coding sequence is the same as the codon usage in the second coding sequence. In other bidirectional constructs, the second coding sequence adopts a different codon usage from the codon usage of the first coding sequence in order to reduce hairpin formation. One or both of the coding sequences can be codon-optimized for expression in a host cell. In some bidirectional constructs, only one of the coding sequences is codon-optimized. In some bidirectional constructs, the first coding sequence is codon-optimized. In some bidirectional constructs, the second coding sequence is codon-optimized. In some bidirectional constructs, both coding sequences are codon-optimized. For example, the second polypeptide of interest coding sequence can be codon optimized or may use one or more alternative codons for one or more amino acids of the same polypeptide of interest (i.e., same amino acid sequence) encoded by the polypeptide of interest coding sequence in the first segment. An alternative codon as used herein refers to variations in codon usage for a given amino acid, and may or may not be a preferred or optimized codon (codon optimized) for a given expression system. Preferred codon usage, or codons that are well-tolerated in a given system of expression are known.

[0376] In one example, the second segment comprises a reverse complement of a polypeptide of interest coding sequence that adopts different codon usage from that of the polypeptide of interest coding sequence in the first segment in order to reduce hairpin formation. Such a reverse complement forms base pairs with fewer than all nucleotides of the coding sequence in the first segment, yet it optionally encodes the same polypeptide. In one example, the reverse complement sequence in the second segment is not substantially complementary (e.g., not more than 70% complementary) to the coding sequence in the first segment. In other cases, however, the second segment comprises a reverse complement sequence that is highly complementary (e.g., at least 90% complementary) to the coding sequence in the first segment.

[0377] The second segment can have any percentage of complementarity to the first segment. For example, the second segment sequence can have at least about 30%, at least about 35%, at least about 40%, at least about 45%, at least about 50%, at least about 55%, at least about 60%, at least about 65%, at least about 70%, at least about 75%, at least about 80%, at least about 85%, at least about 90%, at least about 95%, at least about 97%, or at least about 99% complementarity to the first segment. As another example, the second segment sequence can have less than about 30%, less than about 35%, less than about 40%, less than about 45%, less than about 50%, less than about 55%, less than about 60%, less than about 65%, less than about 70%, less than about 75%, less than about 80%, less than about 85%, less than about 90%, less than about 95%, less than about 97%, or less than about 99% complementarity to the first segment. The reverse complement of the second coding sequence can be, in some nucleic acid constructs, not substantially complementary (e.g., not more than 70% complementary) to the first coding sequence, not substantially complementary to a fragment of the first coding sequence, highly complementary (e.g., at least 90% complementary) to the first coding sequence, highly complementary to a fragment of the first coding sequence, about 50% to about 80% identical to the reverse complement of the first coding sequence, or about 60% to about 100% identical to the reverse complement of the first coding sequence.

[0378] The bidirectional constructs disclosed herein can be modified to include any suitable structural feature as needed for any particular use and/or that confers one or more desired function. For example, the bidirectional nucleic acid constructs disclosed herein need not comprise a homology arm and/or can be, for example, homology-independent donor constructs. Owing in part to the bidirectional function of the nucleic acid constructs, the bidirectional constructs can be inserted into a genomic locus in either direction as described herein to allow for efficient insertion and/or expression of the polypeptide of interest.

[0379] In some cases, the bidirectional nucleic acid construct does not comprise a promoter that drives the expression of the polypeptide of interest. For example, the expression of the polypeptide of interest can be driven by a promoter of the host cell (e.g., the endogenous ALB promoter when the transgene is integrated into a host cell’s ALB locus). In other cases, the bidirectional nucleic acid construct can comprise one or more promoters operably linked to the coding sequences for the polypeptide of interest. That is, although not required for expression, the constructs disclosed herein may also include transcriptional or translational regulatory sequences such as promoters, enhancers, insulators, internal ribosome entry sites, additional sequences encoding peptides, and/or polyadenylation signals. Some bidirectional constructs can comprise a promoter that drives expression of the first polypeptide of interest coding sequence and/or the reverse complement of a promoter that drives expression of the reverse complement of the second polypeptide of interest coding sequence.

[0380] The bidirectional constructs disclosed herein can be modified to include or exclude any suitable structural feature as needed for any particular use and/or that confers one or more desired functions. For example, some bidirectional nucleic acid constructs disclosed herein do not comprise a homology arm. Owing in part to the bidirectional function of the nucleic acid construct, the bidirectional construct can be inserted into a genomic locus in either direction (orientation) as described herein to allow for efficient insertion and/or expression of a polypeptide of interest.

[0381] The bidirectional constructs can, in some cases, comprise one or more (e.g., two) polyadenylation tail sequences or polyadenylation signal sequences. In some bidirectional constructs, the first segment can comprise a polyadenylation signal sequence. In some bidirectional constructs, the second segment can comprise a polyadenylation signal sequence. In some bidirectional constructs, the first segment can comprise a first polyadenylation signal sequence, and the second segment can comprise a second polyadenylation signal sequence (e.g., a reverse complement of a polyadenylation signal sequence). In some bidirectional constructs, the first segment can comprise a first polyadenylation signal sequence located 3′ of the first coding sequence. In some bidirectional constructs, the second segment can comprise a reverse complement of a second polyadenylation signal sequence located 5′ of the reverse complement of the second coding sequence. In some bidirectional constructs, the first segment can comprise a first polyadenylation signal sequence located 3′ of the first coding sequence, and the second segment can comprise a reverse complement of a second polyadenylation signal sequence located 5′ of the reverse complement of the second coding sequence. The first and second polyadenylation signal sequences can be the same or different. In one example, the first and second polyadenylation signals are different. In a specific example, the first polyadenylation signal is a simian virus 40 (SV40) late polyadenylation signal (or a variant thereof), and the second polyadenylation signal is a bovine growth hormone (BGH) polyadenylation signal (or a variant thereof), or vice versa. For example, one polyadenylation signal can be an SV40 polyadenylation signal, and the other polyadenylation signal can be a BGH polyadenylation signal. In a specific example, one polyadenylation signal can comprise, consist essentially of, or consist of SEQ ID NO: 161, and the other polyadenylation signal can comprise, consist essentially of, or consist of SEQ ID NO: 162.

[0382] In some bidirectional constructs, both the first segment and the second segment comprise a polyadenylation tail sequence. Methods of designing a suitable polyadenylation tail sequence are known. For example, in some bidirectional constructs, one or both of the first and second segment comprises a polyadenylation tail sequence and/or a polyadenylation signal sequence downstream of an open reading frame (i.e., a polyadenylation tail sequence and/or a polyadenylation signal sequence 3′ of a coding sequence, or a reverse complement of a polyadenylation tail sequence and/or a polyadenylation signal sequence 5′ of a reverse complement of a coding sequence). The polyadenylation tail sequence can be encoded, for example, as a “poly-A” stretch downstream of the polypeptide of interest coding sequence (or other protein coding sequence) in the first and/or second segment. A poly-A tail can comprise, for example, at least 20, 30, 40, 50, 60, 70, 80, 90, or 100 adenines, and optionally up to 300 adenines. In a specific example, the poly-A tail comprises 95, 96, 97, 98, 99, or 100 adenine nucleotides. Methods of designing a suitable polyadenylation tail sequence and/or polyadenylation signal sequence are well known. For example, the polyadenylation signal sequence AAUAAA is commonly used in mammalian systems, although variants such as UAUAAA or AU/GUAAA have been identified. See, e.g., Proudfoot (2011) Genes & Dev. 25(17):1770-82, herein incorporated by reference in its entirety for all purposes. In some bidirectional constructs, a single bidirectional terminator can be used to terminate RNA polymerase transcription in either the sense or the antisense direction (i.e., to terminate RNA polymerase transcription from both the first segment and the second segment). Examples of bidirectional terminators include the ARO4, TRP1, TRP4, ADH1, CYC1, GAL1, GAL7, and GAL10 terminators.

[0383] The bidirectional constructs can, in some cases, comprise one or more (e.g., two) splice acceptor sites. In some bidirectional constructs, the first segment can comprise a splice acceptor site. In some bidirectional constructs, the second segment can comprise a splice acceptor site. In some bidirectional constructs, the first segment can comprise a first splice acceptor site, and the second segment can comprise a second splice acceptor site (e.g., a reverse complement of a splice acceptor site). In some bidirectional constructs, the first segment comprises a first splice acceptor site located 5′ of the first coding sequence. In some bidirectional constructs, the second segment comprises a reverse complement of a second splice acceptor site located 3′ of the reverse complement of the second coding sequence. In some bidirectional constructs, the first segment comprises a first splice acceptor site located 5′ of the first coding sequence, and the second segment comprises a reverse complement of a second splice acceptor site located 3′ of the reverse complement of the second coding sequence. The first and second splice acceptor sites can be the same or different. In a specific example, both splice acceptors are mouse Alb exon 2 splice acceptors. In a specific example, both splice acceptors can comprise, consist essentially of, or consist of SEQ ID NO: 163.

[0384] A bidirectional construct may comprise a first coding sequence that encodes a first coding sequence linked to a splice acceptor and a reverse complement of a second coding sequence operably linked to the reverse complement of a splice acceptor. The bidirectional constructs disclosed herein can also comprise a splice acceptor site on either or both ends of the construct, or splice acceptor sites in both the first segment and the second segment (e.g., a splice acceptor site 5′ of a coding sequence, or a reverse complement of a splice acceptor 3′ of a reverse complement of a coding sequence). The splice acceptor site can, for example, comprise NAG or consist of NAG. In a specific example, the splice acceptor is an ALB splice acceptor (e.g., an ALB splice acceptor used in the splicing together of exons 1 and 2 of ALB (i.e., ALB exon 2 splice acceptor)). For example, such a splice acceptor can be derived from the human ALB gene. In another example, the splice acceptor can be derived from the mouse Alb gene (e.g., an ALB splice acceptor used in the splicing together of exons 1 and 2 of mouse Alb (i.e., mouse Alb exon 2 splice acceptor)). In another example, the splice acceptor is a splice acceptor from a gene encoding the polypeptide of interest. Additional suitable splice acceptor sites useful in eukaryotes, including artificial splice acceptors, are known. See, e.g., Shapiro et al. (1987) Nucleic Acids Res. 15:7155-7174 and Burset et al. (2001) Nucleic Acids Res. 29:255-259, each of which is herein incorporated by reference in its entirety for all purposes. The splice acceptors used in a bidirectional construct may be the same or different. In a specific example, both splice acceptors are mouse Alb exon 2 splice acceptors.

[0385] The bidirectional constructs can be circular or linear. For example, a bidirectional construct can be linear. The first and second segments can be joined in a linear manner through a linker sequence. For example, the 5′ end of the second segment that comprises a reverse complement sequence can be linked to the 3′ end of the first segment. Alternatively, the 5′ end of the first segment can be linked to the 3′ end of the second segment that comprises a reverse complement sequence. The linker can be any suitable length. For example, the linker can be between about 5 to about 2000 nucleotides in length. As an example, the linker sequence can be about 1, about 2, about 3, about 4, about 5, about 6, about 7, about 8, about 9, about 10, about 11, about 12, about 13, about 14, about 15, about 16, about 17, about 18, about 19, about 20, about 25, about 30, about 35, about 40, about 45, about 50, about 55, about 60, about 65, about 70, about 75, about 80, about 85, about 90, about 95, about 100, about 150, about 200, about 250, about 300, about 500, about 1000, about 1500, about 2000, or more nucleotides in length. Other structural elements in addition to, or instead of, a linker sequence, can also be inserted between the first and second segments.

[0386] The bidirectional constructs disclosed herein can be DNA or RNA, single-stranded, double-stranded, or partially single-stranded and partially double-stranded. For example, the constructs can be single- or double-stranded DNA. In some embodiments, the nucleic acid can be modified (e.g., using nucleoside analogs), as described herein. In a specific example, the bidirectional construct is single-stranded (e.g., single-stranded DNA).

[0387] The bidirectional constructs disclosed herein can be modified on either or both ends to include one or more suitable structural features as needed and/or to confer one or more functional benefit. For example, structural modifications can vary depending on the method(s) used to deliver the constructs disclosed herein to a host cell (e.g., use of viral vector delivery or packaging into lipid nanoparticles for delivery). Such modifications include, for example, terminal structures such as inverted terminal repeats (ITR), hairpin, loops, and other structures such as toroids. For example, the constructs disclosed herein can comprise one, two, or three ITRs or can comprise no more than two ITRs. Various methods of structural modifications are known.

[0388] Similarly, one or both ends of the construct can be protected (e.g., from exonucleolytic degradation) by known methods. For example, one or more dideoxynucleotide residues can be added to the 3′ terminus of a linear molecule and/or self-complementary oligonucleotides can be ligated to one or both ends. See, e.g., Chang et al. (1987) Proc. Natl. Acad. Sci. U.S.A. 84:4959-4963 and Nehls et al. (1996) Science 272:886-889, each of which is herein incorporated by reference in its entirety for all purposes. Additional methods for protecting the constructs from degradation include, but are not limited to, addition of terminal amino group(s) and the use of modified internucleotide linkages such as, for example, phosphorothioates, phosphoramidates, and O-methyl ribose or deoxyribose residues.

[0389] As disclosed in more detail herein, the bidirectional constructs disclosed herein can be introduced into a cell as part of a vector having additional sequences such as, for example, replication origins, promoters, and genes encoding antibiotic resistance. The constructs can be introduced as a naked nucleic acid, can be introduced as a nucleic acid complexed with an agent such as a liposome, polymer, or poloxamer, or can be delivered by viral vectors (e.g., adenovirus, AAV, herpesvirus, retrovirus, lentivirus).

[0390] In an exemplary bidirectional construct, the second segment is located 3′ of the first segment, the first polypeptide of interest coding sequence and the second polypeptide of interest coding sequence both encode the same human polypeptide of interest, the second polypeptide of interest coding sequence adopts a different codon usage from the codon usage of the first polypeptide of interest coding sequence, the first segment comprises a first polyadenylation signal sequence located 3′ of the first polypeptide of interest coding sequence, the second segment comprises a reverse complement of a second polyadenylation signal sequence located 5′ of the reverse complement of the second polypeptide of interest coding sequence, the first segment comprises a first splice acceptor site located 5′ of the first polypeptide of interest coding sequence, the second segment comprises a reverse complement of a second splice acceptor site located 3′ of the reverse complement of the second polypeptide of interest coding sequence, the nucleic acid construct does not comprise a promoter that drives expression of the first polypeptide of interest or the second polypeptide of interest, and optionally the nucleic acid construct does not comprise a homology arm.

### Unidirectional Constructs

[0391] The nucleic acid constructs disclosed herein can be unidirectional constructs. When specific unidirectional construct sequences are disclosed herein, they are meant to encompass the sequence disclosed or the reverse complement of the sequence. For example, if a unidirectional construct disclosed herein consists of the hypothetical sequence 5′-CTGGACCGA-3′, it is also meant to encompass the reverse complement of that sequence (5′-TCGGTCCAG-3′). Likewise, when unidirectional construct elements are disclosed herein in a specific 5′ to 3′ order, they are also meant to encompass the reverse complement of the order of those elements. One reason for this is that, in many embodiments disclosed herein, the unidirectional constructs are part of a single-stranded recombinant AAV vector. Single-stranded AAV genomes are packaged as either sense (plus-stranded) or anti-sense (minus-stranded genomes), and single-stranded AAV genomes of + and - polarity are packaged with equal frequency into mature rAAV virions. See, e.g., LING et al. (2015) J. Mol. Genet. Med. 9(3):175, Zhou et al. (2008) Mol. Ther. 16(3):494-499, and Samulski et al. (1987) J. Virol. 61:3096-3101, each of which is herein incorporated by reference in its entirety for all purposes.

[0392] In the unidirectional constructs, the coding sequence for the polypeptide of interest can be codon-optimized for expression in a host cell. For example, the coding sequence can be codon optimized or may use one or more alternative codons for one or more amino acids of the polypeptide of interest (i.e., same amino acid sequence). An alternative codon as used herein refers to variations in codon usage for a given amino acid, and may or may not be a preferred or optimized codon (codon optimized) for a given expression system. Preferred codon usage, or codons that are well-tolerated in a given system of expression, are known.

[0393] The unidirectional constructs disclosed herein can be modified to include any suitable structural feature as needed for any particular use and/or that confers one or more desired functions. For example, the unidirectional nucleic acid constructs disclosed herein need not comprise a homology arm and/or can be, for example, homology-independent donor constructs.

[0394] In some cases, the unidirectional nucleic acid construct does not comprise a promoter that drives the expression of polypeptide of interest. For example, the expression of the polypeptide of interest can be driven by a promoter of the host cell (e.g., the endogenous ALB promoter when the transgene is integrated into a host cell’s ALB locus). In other cases, the unidirectional nucleic acid construct can comprise one or more promoters operably linked to the coding sequence for the polypeptide of interest. That is, although not required for expression, the constructs disclosed herein may also include transcriptional or translational regulatory sequences such as promoters, enhancers, insulators, internal ribosome entry sites, additional sequences encoding peptides, and/or polyadenylation signals. Some unidirectional constructs can comprise a promoter that drives expression of the coding sequence for the polypeptide of interest.

[0395] The unidirectional constructs can, in some cases, comprise one or more polyadenylation tail sequences or polyadenylation signal sequences. Some unidirectional constructs can comprise a polyadenylation signal sequence located 3′ of the coding sequence for the polypeptide of interest. In a specific example, the polyadenylation signal is a simian virus 40 (SV40) late polyadenylation signal (or a variant thereof). In another specific example, the polyadenylation signal is a bovine growth hormone (BGH) polyadenylation signal (or a variant thereof). In another specific example, the polyadenylation signal is a BGH polyadenylation signal. For example, the polyadenylation signal can be an SV40 polyadenylation signal or a BGH polyadenylation signal. In a specific example, the polyadenylation signal can comprise, consist essentially of, or consist of SEQ ID NO: 161. In another specific example, the polyadenylation signal can comprise, consist essentially of, or consist of SEQ ID NO: 162.

[0396] Methods of designing a suitable polyadenylation tail sequence are known. For example, some unidirectional constructs comprise a polyadenylation tail sequence and/or a polyadenylation signal sequence downstream of an open reading frame (i.e., a polyadenylation tail sequence and/or a polyadenylation signal sequence 3′ of a coding sequence). The polyadenylation tail sequence can be encoded, for example, as a “poly-A” stretch downstream of the coding sequence for the polypeptide of interest (or other protein coding sequence) in the first and/or second segment. A poly-A tail can comprise, for example, at least 20, 30, 40, 50, 60, 70, 80, 90, or 100 adenines, and optionally up to 300 adenines. In a specific example, the poly-A tail comprises 95, 96, 97, 98, 99, or 100 adenine nucleotides. Methods of designing a suitable polyadenylation tail sequence and/or polyadenylation signal sequence are well known. For example, the polyadenylation signal sequence AAUAAA is commonly used in mammalian systems, although variants such as UAUAAA or AU/GUAAA have been identified. See, e.g., Proudfoot (2011) Genes & Dev. 25(17):1770-82, herein incorporated by reference in its entirety for all purposes.

[0397] The unidirectional constructs can, in some cases, comprise one or more splice acceptor sites. Some unidirectional constructs comprise a splice acceptor site located 5′ of the coding sequence for the polypeptide of interest. In a specific example, the splice acceptor is a mouse Alb exon 2 splice acceptor. In a specific example, the splice acceptor can comprise, consist essentially of, or consist of SEQ ID NO: 163.

[0398] The splice acceptor site can, for example, comprise NAG or consist of NAG. In a specific example, the splice acceptor is an ALB splice acceptor (e.g., an ALB splice acceptor used in the splicing together of exons 1 and 2 of ALB (i.e., ALB exon 2 splice acceptor)). For example, such a splice acceptor can be derived from the human ALB gene. In another example, the splice acceptor can be derived from the mouse Alb gene (e.g., an ALB splice acceptor used in the splicing together of exons 1 and 2 of mouse Alb (i.e., mouse Alb exon 2 splice acceptor)). In another example, the splice acceptor is a splice acceptor from the gene encoding the polypeptide of interest. Additional suitable splice acceptor sites useful in eukaryotes, including artificial splice acceptors, are known. See, e.g., Shapiro et al. (1987) Nucleic Acids Res. 15:7155-7174 and Burset et al. (2001) Nucleic Acids Res. 29:255-259, each of which is herein incorporated by reference in its entirety for all purposes.

[0399] The unidirectional constructs can be circular or linear. For example, a unidirectional construct can be linear.

[0400] The unidirectional constructs disclosed herein can be DNA or RNA, single-stranded, double-stranded, or partially single-stranded and partially double-stranded. For example, the constructs can be single- or double-stranded DNA. In some embodiments, the nucleic acid can be modified (e.g., using nucleoside analogs), as described herein. In a specific example, the unidirectional construct is single-stranded (e.g., single-stranded DNA).

[0401] The unidirectional constructs disclosed herein can be modified on either or both ends to include one or more suitable structural features as needed and/or to confer one or more functional benefit. For example, structural modifications can vary depending on the method(s) used to deliver the constructs disclosed herein to a host cell (e.g., use of viral vector delivery or packaging into lipid nanoparticles for delivery). Such modifications include, for example, terminal structures such as inverted terminal repeats (ITR), hairpin, loops, and other structures such as toroids. For example, the constructs disclosed herein can comprise one, two, or three ITRs or can comprise no more than two ITRs. Various methods of structural modifications are known.

[0402] Similarly, one or both ends of the construct can be protected (e.g., from exonucleolytic degradation) by known methods. For example, one or more dideoxynucleotide residues can be added to the 3′ terminus of a linear molecule and/or self-complementary oligonucleotides can be ligated to one or both ends. See, e.g., Chang et al. (1987) Proc. Natl. Acad. Sci. U.S.A. 84:4959-4963 and Nehls et al. (1996) Science 272:886-889, each of which is herein incorporated by reference in its entirety for all purposes. Additional methods for protecting the constructs from degradation include, but are not limited to, addition of terminal amino group(s) and the use of modified internucleotide linkages such as, for example, phosphorothioates, phosphoramidates, and O-methyl ribose or deoxyribose residues.

[0403] As disclosed in more detail herein, the unidirectional constructs disclosed herein can be introduced into a cell as part of a vector having additional sequences such as, for example, replication origins, promoters, and genes encoding antibiotic resistance. The constructs can be introduced as a naked nucleic acid, can be introduced as a nucleic acid complexed with an agent such as a liposome, polymer, or poloxamer, or can be delivered by viral vectors (e.g., adenovirus, AAV, herpesvirus, retrovirus, lentivirus).

[0404] In an exemplary unidirectional construct, the construct comprises a polyadenylation signal sequence located 3′ of the coding sequence for the polypeptide of interest, the construct comprises a splice acceptor site located 5′ of the coding sequence for the polypeptide of interest, and the nucleic acid construct does not comprise a promoter that drives expression of the polypeptide of interest, and optionally the nucleic acid construct does not comprise a homology arm.

### Multidomain Therapeutic Protein Nucleic Acid Constructs

[0405] The multidomain therapeutic protein nucleic acid constructs disclosed herein can be unidirectional constructs or bidirectional constructs. When specific construct sequences are disclosed herein, they are meant to encompass the sequence disclosed or the reverse complement of the sequence. For example, if a construct disclosed herein consists of the hypothetical sequence 5′-CTGGACCGA-3′, it is also meant to encompass the reverse complement of that sequence (5′-TCGGTCCAG-3′). Likewise, when construct elements are disclosed herein in a specific 5′ to 3′ order, they are also meant to encompass the reverse complement of the order of those elements. One reason for this is that, in many embodiments disclosed herein, the constructs are part of a single-stranded recombinant AAV vector. Single-stranded AAV genomes are packaged as either sense (plus-stranded) or anti-sense (minus-stranded genomes), and single-stranded AAV genomes of + and - polarity are packaged with equal frequency into mature rAAV virions. See, e.g., LING et al. (2015) J. Mol. Genet. Med. 9(3):175, Zhou et al. (2008) Mol. Ther. 16(3):494-499, and Samulski et al. (1987) J. Virol. 61:3096-3101, each of which is herein incorporated by reference in its entirety for all purposes.

[0406] In the nucleic acid constructs, the multidomain therapeutic protein coding sequence, the CD63-binding delivery domain coding sequence, and/or the GAA coding sequence can be codon-optimized for expression in a host cell. For example, the multidomain therapeutic protein coding sequence, the CD63-binding delivery domain coding sequence, and/or the GAA coding sequence can be codon optimized or may use one or more alternative codons for one or more amino acids of the protein (i.e., same amino acid sequence). An alternative codon as used herein refers to variations in codon usage for a given amino acid, and may or may not be a preferred or optimized codon (codon optimized) for a given expression system. Preferred codon usage, or codons that are well-tolerated in a given system of expression, are known.

[0407] In the nucleic acid constructs, the multidomain therapeutic protein coding sequence, the TfR-binding delivery domain coding sequence, and/or the GAA coding sequence can be codon-optimized for expression in a host cell. For example, the multidomain therapeutic protein coding sequence, the TfR-binding delivery domain coding sequence, and/or the GAA coding sequence can be codon optimized or may use one or more alternative codons for one or more amino acids of the protein (i.e., same amino acid sequence). An alternative codon as used herein refers to variations in codon usage for a given amino acid, and may or may not be a preferred or optimized codon (codon optimized) for a given expression system. Preferred codon usage, or codons that are well-tolerated in a given system of expression, are known.

[0408] The nucleic acid constructs disclosed herein can be modified to include any suitable structural feature as needed for any particular use and/or that confers one or more desired functions. For example, the nucleic acid constructs disclosed herein need not comprise a homology arm and/or can be, for example, homology-independent donor constructs.

[0409] In some cases, the nucleic acid construct does not comprise a promoter that drives the expression of the multidomain therapeutic protein. For example, the expression of the multidomain therapeutic protein can be driven by a promoter of the host cell (e.g., the endogenous ALB promoter when the transgene is integrated into a host cell’s ALB locus). In other cases, the nucleic acid construct can comprise one or more promoters operably linked to the multidomain therapeutic protein coding sequence. That is, although not required for expression, the constructs disclosed herein may also include transcriptional or translational regulatory sequences such as promoters, enhancers, insulators, internal ribosome entry sites, additional sequences encoding peptides, and/or polyadenylation signals. Some nucleic acid constructs can comprise a promoter that drives expression of the multidomain therapeutic protein. For example, the promoter may be a liver-specific promoter. Examples of liver-specific promoters include TTR promoters, such as human or mouse TTR promoters. In one example, the construct may comprise a TTR promoter, such as a mouse TTR promoter or a human TTR promoter (e.g., the coding sequence for the multidomain therapeutic protein is operably linked to the TTR promoter). In one example, the construct may comprise a SERPINA1 enhancer, such as a mouse SERPINA1 enhancer or a human SERPINA1 enhancer (e.g., the coding sequence for the multidomain therapeutic protein is operably linked to the SERPINA1 enhancer). In one example, the construct may comprise a TTR promoter and a SERPINA1 enhancer, such as a human SERPINA1 enhancer and a mouse TTR promoter (e.g., the coding sequence for the multidomain therapeutic protein is operably linked to the SERPINA1 enhancer and the TTR promoter).

[0410] The nucleic acid constructs can, in some cases, comprise one or more polyadenylation tail sequences or polyadenylation signal sequences. Some nucleic acid constructs can comprise a polyadenylation signal sequence located 3′ of the multidomain therapeutic protein coding sequence. In a specific example, the polyadenylation signal is a simian virus 40 (SV40) late polyadenylation signal (or a variant thereof). In another specific example, the polyadenylation signal is a bovine growth hormone (BGH) polyadenylation signal (or a variant thereof). In another specific example, the polyadenylation signal is a CpG-depleted BGH polyadenylation signal. For example, the polyadenylation signal can be an SV40 polyadenylation signal or a CpG-depleted BGH polyadenylation signal. For example, the polyadenylation signal can comprise, consist essentially of, or consist of SEQ ID NO: 712, 169, or 161. In a specific example, the polyadenylation signal can comprise, consist essentially of, or consist of SEQ ID NO: 712. In a specific example, the polyadenylation signal can comprise, consist essentially of, or consist of SEQ ID NO: 169. In another specific example, the polyadenylation signal can comprise, consist essentially of, or consist of SEQ ID NO: 161. In another specific example, the polyadenylation signal can comprise, consist essentially of, or consist of SEQ ID NO: 162.

[0411] Methods of designing a suitable polyadenylation tail sequence are known. For example, some nucleic acid constructs comprise a polyadenylation tail sequence and/or a polyadenylation signal sequence downstream of an open reading frame (i.e., a polyadenylation tail sequence and/or a polyadenylation signal sequence 3′ of a coding sequence). The polyadenylation tail sequence can be encoded, for example, as a “poly-A” stretch downstream of the multidomain therapeutic protein coding sequence (or other protein coding sequence) in the first and/or second segment. A poly-A tail can comprise, for example, at least 20, 30, 40, 50, 60, 70, 80, 90, or 100 adenines, and optionally up to 300 adenines. In a specific example, the poly-A tail comprises 95, 96, 97, 98, 99, or 100 adenine nucleotides. Methods of designing a suitable polyadenylation tail sequence and/or polyadenylation signal sequence are well known. For example, the polyadenylation signal sequence AAUAAA is commonly used in mammalian systems, although variants such as UAUAAA or AU/GUAAA have been identified. See, e.g., Proudfoot (2011) Genes & Dev. 25(17):1770-82, herein incorporated by reference in its entirety for all purposes.

[0412] The nucleic acid constructs can, in some cases, comprise one or more splice acceptor sites. Some nucleic acid constructs comprise a splice acceptor site located 5′ of the multidomain therapeutic protein coding sequence. In a specific example, the splice acceptor is a mouse Alb exon 2 splice acceptor. In a specific example, the splice acceptor can comprise, consist essentially of, or consist of SEQ ID NO: 163.

[0413] The splice acceptor site can, for example, comprise NAG or consist of NAG. In a specific example, the splice acceptor is an ALB splice acceptor (e.g., an ALB splice acceptor used in the splicing together of exons 1 and 2 of ALB (i.e., ALB exon 2 splice acceptor)). For example, such a splice acceptor can be derived from the human ALB gene. In another example, the splice acceptor can be derived from the mouse Alb gene (e.g., an ALB splice acceptor used in the splicing together of exons 1 and 2 of mouse Alb (i.e., mouse Alb exon 2 splice acceptor)). In another example, the splice acceptor is a GAA splice acceptor. For example, such a splice acceptor can be derived from the human GAA gene. Alternatively, such a splice acceptor can be derived from the mouse GAA gene. Additional suitable splice acceptor sites useful in eukaryotes, including artificial splice acceptors, are known. See, e.g., Shapiro et al. (1987) Nucleic Acids Res. 15:7155-7174 and Burset et al. (2001) Nucleic Acids Res. 29:255-259, each of which is herein incorporated by reference in its entirety for all purposes.

[0414] The nucleic acid constructs can be circular or linear. For example, a nucleic acid construct can be linear. The nucleic acid constructs disclosed herein can be DNA or RNA, single-stranded, double-stranded, or partially single-stranded and partially double-stranded. For example, the constructs can be single- or double-stranded DNA. In some embodiments, the nucleic acid can be modified (e.g., using nucleoside analogs), as described herein. In a specific example, the nucleic acid construct is single-stranded (e.g., single-stranded DNA).

[0415] The nucleic acid constructs disclosed herein can be modified on either or both ends to include one or more suitable structural features as needed and/or to confer one or more functional benefit. For example, structural modifications can vary depending on the method(s) used to deliver the constructs disclosed herein to a host cell (e.g., use of viral vector delivery or packaging into lipid nanoparticles for delivery). Such modifications include, for example, terminal structures such as inverted terminal repeats (ITR), hairpin, loops, and other structures such as toroids. For example, the nucleic acid constructs disclosed herein can comprise one, two, or three ITRs or can comprise no more than two ITRs. Various methods of structural modifications are known.

[0416] Similarly, one or both ends of the nucleic acid construct can be protected (e.g., from exonucleolytic degradation) by known methods. For example, one or more dideoxynucleotide residues can be added to the 3′ terminus of a linear molecule and/or self-complementary oligonucleotides can be ligated to one or both ends. See, e.g., Chang et al. (1987) Proc. Natl. Acad. Sci. U.S.A. 84:4959-4963 and Nehls et al. (1996) Science 272:886-889, each of which is herein incorporated by reference in its entirety for all purposes. Additional methods for protecting the constructs from degradation include, but are not limited to, addition of terminal amino group(s) and the use of modified internucleotide linkages such as, for example, phosphorothioates, phosphoramidates, and O-methyl ribose or deoxyribose residues.

[0417] As disclosed in more detail herein, the nucleic acid constructs disclosed herein can be introduced into a cell as part of a vector having additional sequences such as, for example, replication origins, promoters, and genes encoding antibiotic resistance. The nucleic acid constructs can be introduced as a naked nucleic acid, can be introduced as a nucleic acid complexed with an agent such as a liposome, polymer, or poloxamer, or can be delivered by viral vectors (e.g., adenovirus, AAV, herpesvirus, retrovirus, lentivirus).

[0418] The multidomain therapeutic protein coding sequence, the CD63-binding delivery domain coding sequence, and/or the GAA coding sequence in the nucleic acid constructs disclosed herein may include one or more modifications such as codon optimization (e.g., to human codons), depletion of CpG dinucleotides, mutation of cryptic splice sites, addition of one or more glycosylation sites, or any combination thereof. CpG dinucleotides in a construct can limit the therapeutic utility of the construct. First, unmethylated CpG dinucleotides can interact with host toll-like receptor-9 (TLR-9) to stimulate innate, proinflammatory immune responses. Second, once the CpG dinucleotides become methylated, they can result in the suppression of transgene expression coordinated by methyl-CpG binding proteins. Cryptic splice sites are sequences in a pre-messenger RNA that are not normally used as splice sites, but that can be activated, for example, by mutations that either inactivate canonical splice sites or create splice sites where one did not exist before. Accurate splice site selection is critical for successful gene expression, and removal of cryptic splice sites can favor use of the normal or intended splice site.

[0419] In one example, a multidomain therapeutic protein coding sequence, a CD63-binding delivery domain coding sequence, and/or a GAA coding sequence in a nucleic acid construct disclosed herein has one or more cryptic splice sites mutated or removed. In another example, a multidomain therapeutic protein coding sequence, a CD63-binding delivery domain coding sequence, and/or a GAA coding sequence in a nucleic acid construct disclosed herein has all identified cryptic splice sites mutated or removed. In another example, a multidomain therapeutic protein coding sequence, a CD63-binding delivery domain coding sequence, and/or a GAA coding sequence in a nucleic acid construct disclosed herein has one or more CpG dinucleotides removed (i.e., is CpG depleted). In another example, a multidomain therapeutic protein coding sequence, a CD63-binding delivery domain coding sequence, and/or a GAA coding sequence in a nucleic acid construct disclosed herein has all CpG dinucleotides removed. In another example, a multidomain therapeutic protein coding sequence, a CD63-binding delivery domain coding sequence, and/or a GAA coding sequence in a nucleic acid construct disclosed herein is codon optimized (e.g., codon optimized for expression in a human or mammal). In a specific example, a multidomain therapeutic protein coding sequence, a CD63-binding delivery domain coding sequence, and/or a GAA coding sequence in a nucleic acid construct disclosed herein has one or more CpG dinucleotides removed (i.e., is CpG depleted) and has one or more cryptic splice sites mutated or removed. In another specific example, a multidomain therapeutic protein coding sequence, a CD63-binding delivery domain coding sequence, and/or a GAA coding sequence in a nucleic acid construct disclosed herein has all CpG dinucleotides removed and has one or more or all identified cryptic splice sites mutated or removed. In another specific example, a multidomain therapeutic protein coding sequence, a CD63-binding delivery domain coding sequence, and/or a GAA coding sequence in a nucleic acid construct disclosed herein has one or more CpG dinucleotides removed (i.e., is CpG depleted) and is codon optimized (e.g., codon optimized for expression in a human or mammal). In another specific example, a multidomain therapeutic protein coding sequence, a CD63-binding delivery domain coding sequence, and/or a GAA coding sequence in a nucleic acid construct disclosed herein has all CpG dinucleotides removed (i.e., is fully CpG depleted) and is codon optimized (e.g., codon optimized for expression in a human or mammal).

[0420] The multidomain therapeutic protein coding sequence, the TfR-binding delivery domain coding sequence, and/or the GAA coding sequence in the nucleic acid constructs disclosed herein may include one or more modifications such as codon optimization (e.g., to human codons), depletion of CpG dinucleotides, mutation of cryptic splice sites, addition of one or more glycosylation sites, or any combination thereof. CpG dinucleotides in a construct can limit the therapeutic utility of the construct. First, unmethylated CpG dinucleotides can interact with host toll-like receptor-9 (TLR-9) to stimulate innate, proinflammatory immune responses. Second, once the CpG dinucleotides become methylated, they can result in the suppression of transgene expression coordinated by methyl-CpG binding proteins. Cryptic splice sites are sequences in a pre-messenger RNA that are not normally used as splice sites, but that can be activated, for example, by mutations that either inactivate canonical splice sites or create splice sites where one did not exist before. Accurate splice site selection is critical for successful gene expression, and removal of cryptic splice sites can favor use of the normal or intended splice site.

[0421] In one example, a multidomain therapeutic protein coding sequence, a TfR-binding delivery domain coding sequence, and/or a GAA coding sequence in a nucleic acid construct disclosed herein has one or more cryptic splice sites mutated or removed. In another example, a multidomain therapeutic protein coding sequence, a TfR-binding delivery domain coding sequence, and/or a GAA coding sequence in a nucleic acid construct disclosed herein has all identified cryptic splice sites mutated or removed. In another example, a multidomain therapeutic protein coding sequence, a TfR-binding delivery domain coding sequence, and/or a GAA coding sequence in a nucleic acid construct disclosed herein has one or more CpG dinucleotides removed (i.e., is CpG depleted). In another example, a multidomain therapeutic protein coding sequence, a TfR-binding delivery domain coding sequence, and/or a GAA coding sequence in a nucleic acid construct disclosed herein has all CpG dinucleotides removed. In another example, a multidomain therapeutic protein coding sequence, a TfR-binding delivery domain coding sequence, and/or a GAA coding sequence in a nucleic acid construct disclosed herein is codon optimized (e.g., codon optimized for expression in a human or mammal). In a specific example, a multidomain therapeutic protein coding sequence, a TfR-binding delivery domain coding sequence, and/or a GAA coding sequence in a nucleic acid construct disclosed herein has one or more CpG dinucleotides removed (i.e., is CpG depleted) and has one or more cryptic splice sites mutated or removed. In another specific example, a multidomain therapeutic protein coding sequence, a TfR-binding delivery domain coding sequence, and/or a GAA coding sequence in a nucleic acid construct disclosed herein has all CpG dinucleotides removed and has one or more or all identified cryptic splice sites mutated or removed. In another specific example, a multidomain therapeutic protein coding sequence, a TfR-binding delivery domain coding sequence, and/or a GAA coding sequence in a nucleic acid construct disclosed herein has one or more CpG dinucleotides removed (i.e., is CpG depleted) and is codon optimized (e.g., codon optimized for expression in a human or mammal). In another specific example, a multidomain therapeutic protein coding sequence, a TfR-binding delivery domain coding sequence, and/or a GAA coding sequence in a nucleic acid construct disclosed herein has all CpG dinucleotides removed (i.e., is fully CpG depleted) and is codon optimized (e.g., codon optimized for expression in a human or mammal).

[0422] In an exemplary nucleic acid construct, the construct comprises a polyadenylation signal sequence located 3′ of the multidomain therapeutic protein coding sequence, the construct comprises a splice acceptor site located 5′ of the multidomain therapeutic protein coding sequence, and the nucleic acid construct does not comprise a promoter that drives expression of the multidomain therapeutic protein, and optionally the nucleic acid construct does not comprise a homology arm.

[0423] In a specific example of a multidomain therapeutic protein nucleic acid construct, the encoded multidomain therapeutic protein can comprise SEQ ID NO: 193 or can be at least 90%, at least 91%, at least 92%, at least 93%, at least 94%, at least 95%, at least 96%, at least 97%, at least 98%, at least 99%, or at least 99.5% identical to SEQ ID NO: 193. In another specific example, the multidomain therapeutic protein can consist essentially of SEQ ID NO: 193. In another specific example, the multidomain therapeutic protein can consist of SEQ ID NO: 193.

[0424] Various multidomain therapeutic protein coding sequences are provided. In one example, the multidomain therapeutic protein coding sequence is (or comprises a sequence) at least 90%, at least 91%, at least 92%, at least 93%, at least 94%, at least 95%, at least 96%, at least 97%, at least 98%, at least 99%, at least 99.5%, or 100% identical to any one of SEQ ID NOS: 194-202. In another example, the multidomain therapeutic protein coding sequence is (or comprises a sequence) at least 95%, at least 96%, at least 97%, at least 98%, at least 99%, at least 99.5%, or 100% identical to any one of SEQ ID NOS: 194-202. In another example, the multidomain therapeutic protein coding sequence is (or comprises a sequence) at least 99%, at least 99.5%, or 100% identical to any one of SEQ ID NOS: 194-202. In another example, the multidomain therapeutic protein coding sequence comprises the sequence set forth in any one of SEQ ID NOS: 194-202. In another example, the multidomain therapeutic protein coding sequence consists essentially of the sequence set forth in any one of SEQ ID NOS: 194-202. In another example, the multidomain therapeutic protein coding sequence consists of the sequence set forth in any one of SEQ ID NOS: 194-202. In one example, the multidomain therapeutic protein coding sequence is (or comprises a sequence) at least 90%, at least 91%, at least 92%, at least 93%, at least 94%, at least 95%, at least 96%, at least 97%, at least 98%, at least 99%, at least 99.5%, or 100% identical to SEQ ID NO: 196. In another example, the multidomain therapeutic protein coding sequence is (or comprises a sequence) at least 95%, at least 96%, at least 97%, at least 98%, at least 99%, at least 99.5%, or 100% identical to SEQ ID NO: 196. In another example, the multidomain therapeutic protein coding sequence is (or comprises a sequence) at least 99%, at least 99.5%, or 100% identical to SEQ ID NO: 196. In another example, the multidomain therapeutic protein coding sequence comprises the sequence set forth in SEQ ID NO: 196. In another example, the multidomain therapeutic protein coding sequence consists essentially of the sequence set forth in SEQ ID NO: 196. In another example, the multidomain therapeutic protein coding sequence consists of the sequence set forth in SEQ ID NO: 196. Optionally, the multidomain therapeutic protein coding sequence encodes a multidomain therapeutic protein (or a multidomain therapeutic protein comprising a sequence) at least 90%, at least 91%, at least 92%, at least 93%, at least 94%, at least 95%, at least 96%, at least 97%, at least 98%, at least 99%, at least 99.5%, or 100% identical to SEQ ID NO: 193 (and, e.g., retaining the activity of native GAA). Optionally, the multidomain therapeutic protein coding sequence encodes a multidomain therapeutic protein (or a multidomain therapeutic protein comprising a sequence) at least 95%, at least 96%, at least 97%, at least 98%, at least 99%, at least 99.5%, or 100% identical to SEQ ID NO: 193 (and, e.g., retaining the activity of native GAA). Optionally, the multidomain therapeutic protein coding sequence in the above examples encodes a multidomain therapeutic protein (or a multidomain therapeutic protein comprising a sequence) at least 99%, at least 99.5%, or 100% identical to SEQ ID NO: 193 (and, e.g., retaining the activity of native GAA). Optionally, the multidomain therapeutic protein coding sequence in the above examples encodes a multidomain therapeutic protein comprising the sequence set forth in SEQ ID NO: 193. Optionally, the multidomain therapeutic protein coding sequence in the above examples encodes a multidomain therapeutic protein consisting essentially of the sequence set forth in SEQ ID NO: 193. Optionally, the multidomain therapeutic protein coding sequence in the above examples encodes a multidomain therapeutic protein consisting of the sequence set forth in SEQ ID NO: 193.

[0425] Various codon optimized multidomain therapeutic protein coding sequences are provided. The multidomain therapeutic protein coding sequence can be, for example, CpG-depleted (e.g., fully CpG depleted) and/or codon optimized (e.g., CpG depleted (e.g., fully CpG-depleted) and codon optimized). In one example, the multidomain therapeutic protein coding sequence is (or comprises a sequence) at least 90%, at least 91%, at least 92%, at least 93%, at least 94%, at least 95%, at least 96%, at least 97%, at least 98%, at least 99%, at least 99.5%, or 100% identical to any one of SEQ ID NOS: 195-202. In another example, the multidomain therapeutic protein coding sequence is (or comprises a sequence) at least 95%, at least 96%, at least 97%, at least 98%, at least 99%, at least 99.5%, or 100% identical to any one of SEQ ID NOS: 195-202. In another example, the multidomain therapeutic protein coding sequence is (or comprises a sequence) at least 99%, at least 99.5%, or 100% identical to any one of SEQ ID NOS: 195-202. In another example, the multidomain therapeutic protein coding sequence comprises the sequence set forth in any one of SEQ ID NOS: 195-202. In another example, the multidomain therapeutic protein coding sequence consists essentially of the sequence set forth in any one of SEQ ID NOS: 195-202. In another example, the multidomain therapeutic protein coding sequence consists of the sequence set forth in any one of SEQ ID NOS: 195-202. Optionally, the multidomain therapeutic protein coding sequence encodes a multidomain therapeutic protein (or a multidomain therapeutic protein comprising a sequence) at least 90%, at least 91%, at least 92%, at least 93%, at least 94%, at least 95%, at least 96%, at least 97%, at least 98%, at least 99%, at least 99.5%, or 100% identical to SEQ ID NO: 193 (and, e.g., retaining the activity of native GAA). Optionally, the multidomain therapeutic protein coding sequence encodes a multidomain therapeutic protein (or a multidomain therapeutic protein comprising a sequence) at least 95%, at least 96%, at least 97%, at least 98%, at least 99%, at least 99.5%, or 100% identical to SEQ ID NO: 193 (and, e.g., retaining the activity of native GAA). Optionally, the GAA coding sequence in the above examples encodes a multidomain therapeutic protein (or a multidomain therapeutic protein comprising a sequence) at least 99%, at least 99.5%, or 100% identical to SEQ ID NO: 193 (and, e.g., retaining the activity of native GAA). Optionally, the multidomain therapeutic protein coding sequence in the above examples encodes a multidomain therapeutic protein comprising the sequence set forth in SEQ ID NO: 193. Optionally, the multidomain therapeutic protein coding sequence in the above examples encodes a multidomain therapeutic protein consisting essentially of the sequence set forth in SEQ ID NO: 193. Optionally, the multidomain therapeutic protein coding sequence in the above examples encodes a multidomain therapeutic protein consisting of the sequence set forth in SEQ ID NO: 193.

[0426] In one example, the multidomain therapeutic protein coding sequence is (or comprises a sequence) at least 90%, at least 91%, at least 92%, at least 93%, at least 94%, at least 95%, at least 96%, at least 97%, at least 98%, at least 99%, at least 99.5%, or 100% identical to SEQ ID NO: 196. In another example, the multidomain therapeutic protein coding sequence is (or comprises a sequence) at least 90%, at least 91%, at least 92%, at least 93%, at least 94%, at least 95%, at least 96%, at least 97%, at least 98%, at least 99%, at least 99.5%, or 100% identical to SEQ ID NO: 196 and encodes a multidomain therapeutic protein (or a multidomain therapeutic protein comprising a sequence) at least 99%, at least 99.5%, or 100% identical to SEQ ID NO: 193. In another example, the multidomain therapeutic protein coding sequence is (or comprises a sequence) at least 90%, at least 91%, at least 92%, at least 93%, at least 94%, at least 95%, at least 96%, at least 97%, at least 98%, at least 99%, at least 99.5%, or 100% identical to SEQ ID NO: 196 and encodes a multidomain therapeutic protein comprising the sequence set forth in SEQ ID NO: 193. In another example, the multidomain therapeutic protein coding sequence is (or comprises a sequence) at least 95%, at least 96%, at least 97%, at least 98%, at least 99%, at least 99.5%, or 100% identical to SEQ ID NO: 196. In another example, the multidomain therapeutic protein coding sequence is (or comprises a sequence) at least 95%, at least 96%, at least 97%, at least 98%, at least 99%, at least 99.5%, or 100% identical to SEQ ID NO: 196 and encodes a multidomain therapeutic protein (or a multidomain therapeutic protein comprising a sequence) at least 99%, at least 99.5%, or 100% identical to SEQ ID NO: 193. In another example, the multidomain therapeutic protein coding sequence is (or comprises a sequence) at least 95%, at least 96%, at least 97%, at least 98%, at least 99%, at least 99.5%, or 100% identical to SEQ ID NO: 196 and encodes a multidomain therapeutic protein comprising the sequence set forth in SEQ ID NO: 193. In another example, the multidomain therapeutic protein coding sequence is (or comprises a sequence) at least 99%, at least 99.5%, or 100% identical to SEQ ID NO: 196. In another example, the multidomain therapeutic protein coding sequence is (or comprises a sequence) at least 99%, at least 99.5%, or 100% identical to SEQ ID NO: 196 and encodes a multidomain therapeutic protein (or a multidomain therapeutic protein comprising a sequence) at least 99%, at least 99.5%, or 100% identical to SEQ ID NO: 193. In another example, the multidomain therapeutic protein coding sequence is (or comprises a sequence) at least 99%, at least 99.5%, or 100% identical to SEQ ID NO: 196 and encodes a multidomain therapeutic protein comprising the sequence set forth in SEQ ID NO: 193. In another example, the multidomain therapeutic protein coding sequence comprises the sequence set forth in SEQ ID NO: 196. In another example, the multidomain therapeutic protein coding sequence consists essentially of the sequence set forth in SEQ ID NO: 196. In another example, the multidomain therapeutic protein coding sequence consists of the sequence set forth in SEQ ID NO: 196. The multidomain therapeutic protein coding sequence can be, for example, CpG-depleted (e.g., fully CpG-depleted) and/or codon optimized. For example, the multidomain therapeutic protein coding sequence can be CpG depleted (e.g., fully CpG-depleted) and codon optimized. Optionally, the multidomain therapeutic protein coding sequence encodes a multidomain therapeutic protein (or a multidomain therapeutic protein comprising a sequence) at least 90%, at least 91%, at least 92%, at least 93%, at least 94%, at least 95%, at least 96%, at least 97%, at least 98%, at least 99%, at least 99.5%, or 100% identical to SEQ ID NO: 193 (and, e.g., retaining the activity of native GAA). Optionally, the multidomain therapeutic protein coding sequence encodes a multidomain therapeutic protein (or a multidomain therapeutic protein comprising a sequence) at least 95%, at least 96%, at least 97%, at least 98%, at least 99%, at least 99.5%, or 100% identical to SEQ ID NO: 193 (and, e.g., retaining the activity of native GAA). Optionally, the multidomain therapeutic protein coding sequence in the above examples encodes a multidomain therapeutic protein (or a multidomain therapeutic protein comprising a sequence) at least 99%, at least 99.5%, or 100% identical to SEQ ID NO: 193 (and, e.g., retaining the activity of native GAA). Optionally, the multidomain therapeutic protein coding sequence in the above examples encodes a multidomain therapeutic protein comprising the sequence set forth in SEQ ID NO: 193. Optionally, the multidomain therapeutic protein coding sequence in the above examples encodes a multidomain therapeutic protein consisting essentially of the sequence set forth in SEQ ID NO: 193. Optionally, the multidomain therapeutic protein coding sequence in the above examples encodes a multidomain therapeutic protein consisting of the sequence set forth in SEQ ID NO: 193.

[0427] The nucleic acid construct can comprise, for example, (1) a 5′ ITR (e.g., such as the one set forth in SEQ ID NO: 160), (2) a splice acceptor site (e.g., a mouse Alb exon 2 splice acceptor, such as the one set forth in SEQ ID NO: 163), (3) the multidomain therapeutic protein coding sequence, (4) a polyadenylation signal (e.g., an SV40 polyadenylation signal, such as the one set forth in SEQ ID NO: 712), and (5) a 3′ ITR (e.g., such as the one set forth in SEQ ID NO: 160 or the reverse complement thereof). In one example, the nucleic acid construct comprises a sequence at least 90%, at least 91%, at least 92%, at least 93%, at least 94%, at least 95%, at least 96%, at least 97%, at least 98%, at least 99%, at least 99.5%, or 100% identical to SEQ ID NO: 736. In another example, the nucleic acid construct comprises a sequence at least 90%, at least 91%, at least 92%, at least 93%, at least 94%, at least 95%, at least 96%, at least 97%, at least 98%, at least 99%, at least 99.5%, or 100% identical to SEQ ID NO: 736 and encodes a multidomain therapeutic protein (or a multidomain therapeutic protein comprising a sequence) at least 99%, at least 99.5%, or 100% identical to SEQ ID NO: 193. In another example, the nucleic acid construct comprises a sequence at least 90%, at least 91%, at least 92%, at least 93%, at least 94%, at least 95%, at least 96%, at least 97%, at least 98%, at least 99%, at least 99.5%, or 100% identical to SEQ ID NO: 736 and encodes a multidomain therapeutic protein comprising the sequence set forth in SEQ ID NO: 193. In another example, the nucleic acid construct comprises a sequence at least 95%, at least 96%, at least 97%, at least 98%, at least 99%, at least 99.5%, or 100% identical to SEQ ID NO: 736. In another example, the nucleic acid construct comprises a sequence at least 95%, at least 96%, at least 97%, at least 98%, at least 99%, at least 99.5%, or 100% identical to SEQ ID NO: 736 and encodes a multidomain therapeutic protein (or a multidomain therapeutic protein comprising a sequence) at least 99%, at least 99.5%, or 100% identical to SEQ ID NO: 193. In another example, the nucleic acid construct comprises a sequence at least 95%, at least 96%, at least 97%, at least 98%, at least 99%, at least 99.5%, or 100% identical to SEQ ID NO: 736 and encodes a multidomain therapeutic protein comprising the sequence set forth in SEQ ID NO: 193. In another example, the nucleic acid construct comprises a sequence at least 99%, at least 99.5%, or 100% identical to SEQ ID NO: 736. In another example, the nucleic acid construct comprises a sequence at least 99%, at least 99.5%, or 100% identical to SEQ ID NO: 736 and encodes a multidomain therapeutic protein (or a multidomain therapeutic protein comprising a sequence) at least 99%, at least 99.5%, or 100% identical to SEQ ID NO: 193. In another example, the nucleic acid construct comprises a sequence at least 99%, at least 99.5%, or 100% identical to SEQ ID NO: 736 and encodes a multidomain therapeutic protein comprising the sequence set forth in SEQ ID NO: 193. In another example, the nucleic acid construct comprises the sequence set forth in SEQ ID NO: 736. The multidomain therapeutic protein coding sequence can be, for example, CpG-depleted (e.g., fully CpG-depleted) and/or codon optimized. For example, the multidomain therapeutic protein coding sequence can be CpG depleted (e.g., fully CpG-depleted) and codon optimized. Optionally, the nucleic acid construct encodes a multidomain therapeutic protein (or a multidomain therapeutic protein comprising a sequence) at least 90%, at least 91%, at least 92%, at least 93%, at least 94%, at least 95%, at least 96%, at least 97%, at least 98%, at least 99%, at least 99.5%, or 100% identical to SEQ ID NO: 193 (and, e.g., retaining the activity of native GAA). Optionally, the nucleic acid construct encodes a multidomain therapeutic protein (or a multidomain therapeutic protein comprising a sequence) at least 95%, at least 96%, at least 97%, at least 98%, at least 99%, at least 99.5%, or 100% identical to SEQ ID NO: 193 (and, e.g., retaining the activity of native GAA). Optionally, the nucleic acid construct in the above examples encodes a multidomain therapeutic protein (or a multidomain therapeutic protein comprising a sequence) at least 99%, at least 99.5%, or 100% identical to SEQ ID NO: 193 (and, e.g., retaining the activity of native GAA). Optionally, the nucleic acid construct in the above examples encodes a multidomain therapeutic protein comprising the sequence set forth in SEQ ID NO: 193. Optionally, the nucleic acid construct in the above examples encodes a multidomain therapeutic protein consisting essentially of the sequence set forth in SEQ ID NO: 193. Optionally, the nucleic acid construct in the above examples encodes a multidomain therapeutic protein consisting of the sequence set forth in SEQ ID NO: 193.

[0428] In one example, the multidomain therapeutic protein coding sequence is (or comprises a sequence) at least 90%, at least 91%, at least 92%, at least 93%, at least 94%, at least 95%, at least 96%, at least 97%, at least 98%, at least 99%, at least 99.5%, or 100% identical to SEQ ID NO: 194. In another example, the multidomain therapeutic protein coding sequence is (or comprises a sequence) at least 90%, at least 91%, at least 92%, at least 93%, at least 94%, at least 95%, at least 96%, at least 97%, at least 98%, at least 99%, at least 99.5%, or 100% identical to SEQ ID NO: 194 and encodes a multidomain therapeutic protein (or a multidomain therapeutic protein comprising a sequence) at least 99%, at least 99.5%, or 100% identical to SEQ ID NO: 193. In another example, the multidomain therapeutic protein coding sequence is (or comprises a sequence) at least 90%, at least 91%, at least 92%, at least 93%, at least 94%, at least 95%, at least 96%, at least 97%, at least 98%, at least 99%, at least 99.5%, or 100% identical to SEQ ID NO: 194 and encodes a multidomain therapeutic protein comprising the sequence set forth in SEQ ID NO: 193. In another example, the multidomain therapeutic protein coding sequence is (or comprises a sequence) at least 95%, at least 96%, at least 97%, at least 98%, at least 99%, at least 99.5%, or 100% identical to SEQ ID NO: 194. In another example, the multidomain therapeutic protein coding sequence is (or comprises a sequence) at least 95%, at least 96%, at least 97%, at least 98%, at least 99%, at least 99.5%, or 100% identical to SEQ ID NO: 194 and encodes a multidomain therapeutic protein (or a multidomain therapeutic protein comprising a sequence) at least 99%, at least 99.5%, or 100% identical to SEQ ID NO: 193. In another example, the multidomain therapeutic protein coding sequence is (or comprises a sequence) at least 95%, at least 96%, at least 97%, at least 98%, at least 99%, at least 99.5%, or 100% identical to SEQ ID NO: 194 and encodes a multidomain therapeutic protein comprising the sequence set forth in SEQ ID NO: 193. In another example, the multidomain therapeutic protein coding sequence is (or comprises a sequence) at least 99%, at least 99.5%, or 100% identical to SEQ ID NO: 194. In another example, the multidomain therapeutic protein coding sequence is (or comprises a sequence) at least 99%, at least 99.5%, or 100% identical to SEQ ID NO: 194 and encodes a multidomain therapeutic protein (or a multidomain therapeutic protein comprising a sequence) at least 99%, at least 99.5%, or 100% identical to SEQ ID NO: 193. In another example, the multidomain therapeutic protein coding sequence is (or comprises a sequence) at least 99%, at least 99.5%, or 100% identical to SEQ ID NO: 194 and encodes a multidomain therapeutic protein comprising the sequence set forth in SEQ ID NO: 193. In another example, the multidomain therapeutic protein coding sequence comprises the sequence set forth in SEQ ID NO: 194. In another example, the multidomain therapeutic protein coding sequence consists essentially of the sequence set forth in SEQ ID NO: 194. In another example, the multidomain therapeutic protein coding sequence consists of the sequence set forth in SEQ ID NO: 194. The multidomain therapeutic protein coding sequence can be, for example, CpG-depleted (e.g., fully CpG-depleted) and/or codon optimized. For example, the multidomain therapeutic protein coding sequence can be CpG depleted (e.g., fully CpG-depleted) and codon optimized. Optionally, the multidomain therapeutic protein coding sequence encodes a multidomain therapeutic protein (or a multidomain therapeutic protein comprising a sequence) at least 90%, at least 91%, at least 92%, at least 93%, at least 94%, at least 95%, at least 96%, at least 97%, at least 98%, at least 99%, at least 99.5%, or 100% identical to SEQ ID NO: 193 (and, e.g., retaining the activity of native GAA). Optionally, the multidomain therapeutic protein coding sequence encodes a multidomain therapeutic protein (or a multidomain therapeutic protein comprising a sequence) at least 95%, at least 96%, at least 97%, at least 98%, at least 99%, at least 99.5%, or 100% identical to SEQ ID NO: 193 (and, e.g., retaining the activity of native GAA). Optionally, the multidomain therapeutic protein coding sequence in the above examples encodes a multidomain therapeutic protein (or a multidomain therapeutic protein comprising a sequence) at least 99%, at least 99.5%, or 100% identical to SEQ ID NO: 193 (and, e.g., retaining the activity of native GAA). Optionally, the multidomain therapeutic protein coding sequence in the above examples encodes a multidomain therapeutic protein comprising the sequence set forth in SEQ ID NO: 193. Optionally, the multidomain therapeutic protein coding sequence in the above examples encodes a multidomain therapeutic protein consisting essentially of the sequence set forth in SEQ ID NO: 193. Optionally, the multidomain therapeutic protein coding sequence in the above examples encodes a multidomain therapeutic protein consisting of the sequence set forth in SEQ ID NO: 193.

[0429] In one example, the multidomain therapeutic protein coding sequence is (or comprises a sequence) at least 90%, at least 91%, at least 92%, at least 93%, at least 94%, at least 95%, at least 96%, at least 97%, at least 98%, at least 99%, at least 99.5%, or 100% identical to SEQ ID NO: 201. In another example, the multidomain therapeutic protein coding sequence is (or comprises a sequence) at least 90%, at least 91%, at least 92%, at least 93%, at least 94%, at least 95%, at least 96%, at least 97%, at least 98%, at least 99%, at least 99.5%, or 100% identical to SEQ ID NO: 201 and encodes a multidomain therapeutic protein (or a multidomain therapeutic protein comprising a sequence) at least 99%, at least 99.5%, or 100% identical to SEQ ID NO: 193. In another example, the multidomain therapeutic protein coding sequence is (or comprises a sequence) at least 90%, at least 91%, at least 92%, at least 93%, at least 94%, at least 95%, at least 96%, at least 97%, at least 98%, at least 99%, at least 99.5%, or 100% identical to SEQ ID NO: 201 and encodes a multidomain therapeutic protein comprising the sequence set forth in SEQ ID NO: 193. In another example, the multidomain therapeutic protein coding sequence is (or comprises a sequence) at least 95%, at least 96%, at least 97%, at least 98%, at least 99%, at least 99.5%, or 100% identical to SEQ ID NO: 201. In another example, the multidomain therapeutic protein coding sequence is (or comprises a sequence) at least 95%, at least 96%, at least 97%, at least 98%, at least 99%, at least 99.5%, or 100% identical to SEQ ID NO: 201 and encodes a multidomain therapeutic protein (or a multidomain therapeutic protein comprising a sequence) at least 99%, at least 99.5%, or 100% identical to SEQ ID NO: 193. In another example, the multidomain therapeutic protein coding sequence is (or comprises a sequence) at least 95%, at least 96%, at least 97%, at least 98%, at least 99%, at least 99.5%, or 100% identical to SEQ ID NO: 201 and encodes a multidomain therapeutic protein comprising the sequence set forth in SEQ ID NO: 193. In another example, the multidomain therapeutic protein coding sequence is (or comprises a sequence) at least 99%, at least 99.5%, or 100% identical to SEQ ID NO: 201. In another example, the multidomain therapeutic protein coding sequence is (or comprises a sequence) at least 99%, at least 99.5%, or 100% identical to SEQ ID NO: 201 and encodes a multidomain therapeutic protein (or a multidomain therapeutic protein comprising a sequence) at least 99%, at least 99.5%, or 100% identical to SEQ ID NO: 193. In another example, the multidomain therapeutic protein coding sequence is (or comprises a sequence) at least 99%, at least 99.5%, or 100% identical to SEQ ID NO: 201 and encodes a multidomain therapeutic protein comprising the sequence set forth in SEQ ID NO: 193. In another example, the multidomain therapeutic protein coding sequence comprises the sequence set forth in SEQ ID NO: 201. In another example, the multidomain therapeutic protein coding sequence consists essentially of the sequence set forth in SEQ ID NO: 201. In another example, the multidomain therapeutic protein coding sequence consists of the sequence set forth in SEQ ID NO: 201. The multidomain therapeutic protein coding sequence can be, for example, CpG-depleted (e.g., fully CpG-depleted) and/or codon optimized. For example, the multidomain therapeutic protein coding sequence can be CpG depleted (e.g., fully CpG-depleted) and codon optimized. Optionally, the multidomain therapeutic protein coding sequence encodes a multidomain therapeutic protein (or a multidomain therapeutic protein comprising a sequence) at least 90%, at least 91%, at least 92%, at least 93%, at least 94%, at least 95%, at least 96%, at least 97%, at least 98%, at least 99%, at least 99.5%, or 100% identical to SEQ ID NO: 193 (and, e.g., retaining the activity of native GAA). Optionally, the multidomain therapeutic protein coding sequence encodes a multidomain therapeutic protein (or a multidomain therapeutic protein comprising a sequence) at least 95%, at least 96%, at least 97%, at least 98%, at least 99%, at least 99.5%, or 100% identical to SEQ ID NO: 193 (and, e.g., retaining the activity of native GAA). Optionally, the multidomain therapeutic protein coding sequence in the above examples encodes a multidomain therapeutic protein (or a multidomain therapeutic protein comprising a sequence) at least 99%, at least 99.5%, or 100% identical to SEQ ID NO: 193 (and, e.g., retaining the activity of native GAA). Optionally, the multidomain therapeutic protein coding sequence in the above examples encodes a multidomain therapeutic protein comprising the sequence set forth in SEQ ID NO: 193. Optionally, the multidomain therapeutic protein coding sequence in the above examples encodes a multidomain therapeutic protein consisting essentially of the sequence set forth in SEQ ID NO: 193. Optionally, the multidomain therapeutic protein coding sequence in the above examples encodes a multidomain therapeutic protein consisting of the sequence set forth in SEQ ID NO: 193.

[0430] In one example, the multidomain therapeutic protein coding sequence is (or comprises a sequence) at least 90%, at least 91%, at least 92%, at least 93%, at least 94%, at least 95%, at least 96%, at least 97%, at least 98%, at least 99%, at least 99.5%, or 100% identical to SEQ ID NO: 200. In another example, the multidomain therapeutic protein coding sequence is (or comprises a sequence) at least 90%, at least 91%, at least 92%, at least 93%, at least 94%, at least 95%, at least 96%, at least 97%, at least 98%, at least 99%, at least 99.5%, or 100% identical to SEQ ID NO: 200 and encodes a multidomain therapeutic protein (or a multidomain therapeutic protein comprising a sequence) at least 99%, at least 99.5%, or 100% identical to SEQ ID NO: 193. In another example, the multidomain therapeutic protein coding sequence is (or comprises a sequence) at least 90%, at least 91%, at least 92%, at least 93%, at least 94%, at least 95%, at least 96%, at least 97%, at least 98%, at least 99%, at least 99.5%, or 100% identical to SEQ ID NO: 200 and encodes a multidomain therapeutic protein comprising the sequence set forth in SEQ ID NO: 193. In another example, the multidomain therapeutic protein coding sequence is (or comprises a sequence) at least 95%, at least 96%, at least 97%, at least 98%, at least 99%, at least 99.5%, or 100% identical to SEQ ID NO: 200. In another example, the multidomain therapeutic protein coding sequence is (or comprises a sequence) at least 95%, at least 96%, at least 97%, at least 98%, at least 99%, at least 99.5%, or 100% identical to SEQ ID NO: 200 and encodes a multidomain therapeutic protein (or a multidomain therapeutic protein comprising a sequence) at least 99%, at least 99.5%, or 100% identical to SEQ ID NO: 193. In another example, the multidomain therapeutic protein coding sequence is (or comprises a sequence) at least 95%, at least 96%, at least 97%, at least 98%, at least 99%, at least 99.5%, or 100% identical to SEQ ID NO: 200 and encodes a multidomain therapeutic protein comprising the sequence set forth in SEQ ID NO: 193. In another example, the multidomain therapeutic protein coding sequence is (or comprises a sequence) at least 99%, at least 99.5%, or 100% identical to SEQ ID NO: 200. In another example, the multidomain therapeutic protein coding sequence is (or comprises a sequence) at least 99%, at least 99.5%, or 100% identical to SEQ ID NO: 200 and encodes a multidomain therapeutic protein (or a multidomain therapeutic protein comprising a sequence) at least 99%, at least 99.5%, or 100% identical to SEQ ID NO: 193. In another example, the multidomain therapeutic protein coding sequence is (or comprises a sequence) at least 99%, at least 99.5%, or 100% identical to SEQ ID NO: 200 and encodes a multidomain therapeutic protein comprising the sequence set forth in SEQ ID NO: 193. In another example, the multidomain therapeutic protein coding sequence comprises the sequence set forth in SEQ ID NO: 200. In another example, the multidomain therapeutic protein coding sequence consists essentially of the sequence set forth in SEQ ID NO: 200. In another example, the multidomain therapeutic protein coding sequence consists of the sequence set forth in SEQ ID NO: 200. The multidomain therapeutic protein coding sequence can be, for example, CpG-depleted (e.g., fully CpG-depleted) and/or codon optimized. For example, the multidomain therapeutic protein coding sequence can be CpG depleted (e.g., fully CpG-depleted) and codon optimized. Optionally, the multidomain therapeutic protein coding sequence encodes a multidomain therapeutic protein (or a multidomain therapeutic protein comprising a sequence) at least 90%, at least 91%, at least 92%, at least 93%, at least 94%, at least 95%, at least 96%, at least 97%, at least 98%, at least 99%, at least 99.5%, or 100% identical to SEQ ID NO: 193 (and, e.g., retaining the activity of native GAA). Optionally, the multidomain therapeutic protein coding sequence encodes a multidomain therapeutic protein (or a multidomain therapeutic protein comprising a sequence) at least 95%, at least 96%, at least 97%, at least 98%, at least 99%, at least 99.5%, or 100% identical to SEQ ID NO: 193 (and, e.g., retaining the activity of native GAA). Optionally, the multidomain therapeutic protein coding sequence in the above examples encodes a multidomain therapeutic protein (or a multidomain therapeutic protein comprising a sequence) at least 99%, at least 99.5%, or 100% identical to SEQ ID NO: 193 (and, e.g., retaining the activity of native GAA). Optionally, the multidomain therapeutic protein coding sequence in the above examples encodes a multidomain therapeutic protein comprising the sequence set forth in SEQ ID NO: 193. Optionally, the multidomain therapeutic protein coding sequence in the above examples encodes a multidomain therapeutic protein consisting essentially of the sequence set forth in SEQ ID NO: 193. Optionally, the multidomain therapeutic protein coding sequence in the above examples encodes a multidomain therapeutic protein consisting of the sequence set forth in SEQ ID NO: 193.

[0431] In one example, the multidomain therapeutic protein coding sequence is (or comprises a sequence) at least 90%, at least 91%, at least 92%, at least 93%, at least 94%, at least 95%, at least 96%, at least 97%, at least 98%, at least 99%, at least 99.5%, or 100% identical to SEQ ID NO: 198. In another example, the multidomain therapeutic protein coding sequence is (or comprises a sequence) at least 90%, at least 91%, at least 92%, at least 93%, at least 94%, at least 95%, at least 96%, at least 97%, at least 98%, at least 99%, at least 99.5%, or 100% identical to SEQ ID NO: 198 and encodes a multidomain therapeutic protein (or a multidomain therapeutic protein comprising a sequence) at least 99%, at least 99.5%, or 100% identical to SEQ ID NO: 193. In another example, the multidomain therapeutic protein coding sequence is (or comprises a sequence) at least 90%, at least 91%, at least 92%, at least 93%, at least 94%, at least 95%, at least 96%, at least 97%, at least 98%, at least 99%, at least 99.5%, or 100% identical to SEQ ID NO: 198 and encodes a multidomain therapeutic protein comprising the sequence set forth in SEQ ID NO: 193. In another example, the multidomain therapeutic protein coding sequence is (or comprises a sequence) at least 95%, at least 96%, at least 97%, at least 98%, at least 99%, at least 99.5%, or 100% identical to SEQ ID NO: 198. In another example, the multidomain therapeutic protein coding sequence is (or comprises a sequence) at least 95%, at least 96%, at least 97%, at least 98%, at least 99%, at least 99.5%, or 100% identical to SEQ ID NO: 198 and encodes a multidomain therapeutic protein (or a multidomain therapeutic protein comprising a sequence) at least 99%, at least 99.5%, or 100% identical to SEQ ID NO: 193. In another example, the multidomain therapeutic protein coding sequence is (or comprises a sequence) at least 95%, at least 96%, at least 97%, at least 98%, at least 99%, at least 99.5%, or 100% identical to SEQ ID NO: 198 and encodes a multidomain therapeutic protein comprising the sequence set forth in SEQ ID NO: 193. In another example, the multidomain therapeutic protein coding sequence is (or comprises a sequence) at least 99%, at least 99.5%, or 100% identical to SEQ ID NO: 198. In another example, the multidomain therapeutic protein coding sequence is (or comprises a sequence) at least 99%, at least 99.5%, or 100% identical to SEQ ID NO: 198 and encodes a multidomain therapeutic protein (or a multidomain therapeutic protein comprising a sequence) at least 99%, at least 99.5%, or 100% identical to SEQ ID NO: 193. In another example, the multidomain therapeutic protein coding sequence is (or comprises a sequence) at least 99%, at least 99.5%, or 100% identical to SEQ ID NO: 198 and encodes a multidomain therapeutic protein comprising the sequence set forth in SEQ ID NO: 193. In another example, the multidomain therapeutic protein coding sequence comprises the sequence set forth in SEQ ID NO: 198. In another example, the multidomain therapeutic protein coding sequence consists essentially of the sequence set forth in SEQ ID NO: 198. In another example, the multidomain therapeutic protein coding sequence consists of the sequence set forth in SEQ ID NO: 198. The multidomain therapeutic protein coding sequence can be, for example, CpG-depleted (e.g., fully CpG-depleted) and/or codon optimized. For example, the multidomain therapeutic protein coding sequence can be CpG depleted (e.g., fully CpG-depleted) and codon optimized. Optionally, the multidomain therapeutic protein coding sequence encodes a multidomain therapeutic protein (or a multidomain therapeutic protein comprising a sequence) at least 90%, at least 91%, at least 92%, at least 93%, at least 94%, at least 95%, at least 96%, at least 97%, at least 98%, at least 99%, at least 99.5%, or 100% identical to SEQ ID NO: 193 (and, e.g., retaining the activity of native GAA). Optionally, the multidomain therapeutic protein coding sequence encodes a multidomain therapeutic protein (or a multidomain therapeutic protein comprising a sequence) at least 95%, at least 96%, at least 97%, at least 98%, at least 99%, at least 99.5%, or 100% identical to SEQ ID NO: 193 (and, e.g., retaining the activity of native GAA). Optionally, the multidomain therapeutic protein coding sequence in the above examples encodes a multidomain therapeutic protein (or a multidomain therapeutic protein comprising a sequence) at least 99%, at least 99.5%, or 100% identical to SEQ ID NO: 193 (and, e.g., retaining the activity of native GAA). Optionally, the multidomain therapeutic protein coding sequence in the above examples encodes a multidomain therapeutic protein comprising the sequence set forth in SEQ ID NO: 193. Optionally, the multidomain therapeutic protein coding sequence in the above examples encodes a multidomain therapeutic protein consisting essentially of the sequence set forth in SEQ ID NO: 193. Optionally, the multidomain therapeutic protein coding sequence in the above examples encodes a multidomain therapeutic protein consisting of the sequence set forth in SEQ ID NO: 193.

[0432] In some cases, the anti-hTfR:GAA scFv fusion proteins in the format V_{L}-(Gly₄Ser)₃-V_{H}:GAA (Gly₄Ser = SEQ ID NO: 600). In a specific example of a multidomain therapeutic protein nucleic acid construct, the encoded multidomain therapeutic protein can comprise any one of SEQ ID NOS: 570-573 and 675-702 or can be at least 90%, at least 91%, at least 92%, at least 93%, at least 94%, at least 95%, at least 96%, at least 97%, at least 98%, at least 99%, or at least 99.5% identical to any one of SEQ ID NOS: 570-573 and 675-702. In another specific example, the multidomain therapeutic protein can consist essentially of any one of SEQ ID NOS: 570-573 and 675-702. In another specific example, the multidomain therapeutic protein can consist of any one of SEQ ID NOS: 570-573 and 675-702.

[0433] In a specific example of a multidomain therapeutic protein nucleic acid construct, the encoded multidomain therapeutic protein can comprise SEQ ID NO: 570 or can be at least 90%, at least 91%, at least 92%, at least 93%, at least 94%, at least 95%, at least 96%, at least 97%, at least 98%, at least 99%, or at least 99.5% identical to SEQ ID NO: 570. In another specific example, the multidomain therapeutic protein can consist essentially of SEQ ID NO: 570. In another specific example, the multidomain therapeutic protein can consist of SEQ ID NO: 570.

[0434] In a specific example of a multidomain therapeutic protein nucleic acid construct, the encoded multidomain therapeutic protein can comprise SEQ ID NO: 571 or can be at least 90%, at least 91%, at least 92%, at least 93%, at least 94%, at least 95%, at least 96%, at least 97%, at least 98%, at least 99%, or at least 99.5% identical to SEQ ID NO: 571. In another specific example, the multidomain therapeutic protein can consist essentially of SEQ ID NO: 571. In another specific example, the multidomain therapeutic protein can consist of SEQ ID NO: 571.

[0435] In a specific example of a multidomain therapeutic protein nucleic acid construct, the encoded multidomain therapeutic protein can comprise SEQ ID NO: 572 or can be at least 90%, at least 91%, at least 92%, at least 93%, at least 94%, at least 95%, at least 96%, at least 97%, at least 98%, at least 99%, or at least 99.5% identical to SEQ ID NO: 572. In another specific example, the multidomain therapeutic protein can consist essentially of SEQ ID NO: 572. In another specific example, the multidomain therapeutic protein can consist of SEQ ID NO: 572.

[0436] In a specific example of a multidomain therapeutic protein nucleic acid construct, the encoded multidomain therapeutic protein can comprise SEQ ID NO: 573or can be at least 90%, at least 91%, at least 92%, at least 93%, at least 94%, at least 95%, at least 96%, at least 97%, at least 98%, at least 99%, or at least 99.5% identical to SEQ ID NO: 573. In another specific example, the multidomain therapeutic protein can consist essentially of SEQ ID NO: 573. In another specific example, the multidomain therapeutic protein can consist of SEQ ID NO: 573.

[0437] In some cases, the anti-hTfR:GAA scFv fusion proteins in the format V_{H}-(Gly₄Ser)₃-V_{L}:GAA (Gly₄Ser = SEQ ID NO: 600). In a specific example of a multidomain therapeutic protein nucleic acid construct, the encoded multidomain therapeutic protein can comprise any one of SEQ ID NOS: 703-706 (optionally lacking the N-terminal MHRPRRRGTRPPPLALLAALLLAARGADA sequence) or can be at least 90%, at least 91%, at least 92%, at least 93%, at least 94%, at least 95%, at least 96%, at least 97%, at least 98%, at least 99%, or at least 99.5% identical to any one of SEQ ID NOS: 703-706 (optionally lacking the N-terminal MHRPRRRGTRPPPLALLAALLLAARGADA sequence). In another specific example, the multidomain therapeutic protein can consist essentially of any one of SEQ ID NOS: 703-706 (optionally lacking the N-terminal MHRPRRRGTRPPPLALLAALLLAARGADA sequence). In another specific example, the multidomain therapeutic protein can consist of any one of SEQ ID NOS: 703-706 (optionally lacking the N-terminal MHRPRRRGTRPPPLALLAALLLAARGADA sequence).

[0438] Various multidomain therapeutic protein coding sequences are provided. In one example, the multidomain therapeutic protein coding sequence is (or comprises a sequence) at least 90%, at least 91%, at least 92%, at least 93%, at least 94%, at least 95%, at least 96%, at least 97%, at least 98%, at least 99%, at least 99.5%, or 100% identical to any one of SEQ ID NOS: 574-586. In another example, the multidomain therapeutic protein coding sequence is (or comprises a sequence) at least 95%, at least 96%, at least 97%, at least 98%, at least 99%, at least 99.5%, or 100% identical to any one of SEQ ID NOS: 574-586. In another example, the multidomain therapeutic protein coding sequence is (or comprises a sequence) at least 99%, at least 99.5%, or 100% identical to any one of SEQ ID NOS: 574-586. In another example, the multidomain therapeutic protein coding sequence comprises the sequence set forth in any one of SEQ ID NOS: 574-586. In another example, the multidomain therapeutic protein coding sequence consists essentially of the sequence set forth in any one of SEQ ID NOS: 574-586. In another example, the multidomain therapeutic protein coding sequence consists of the sequence set forth in any one of SEQ ID NOS: 574-586. Optionally, the multidomain therapeutic protein coding sequence encodes a multidomain therapeutic protein (or a multidomain therapeutic protein comprising a sequence) at least 90%, at least 91%, at least 92%, at least 93%, at least 94%, at least 95%, at least 96%, at least 97%, at least 98%, at least 99%, at least 99.5%, or 100% identical to any one of SEQ ID NOS: 570-573 (and, e.g., retaining the activity of native GAA). Optionally, the multidomain therapeutic protein coding sequence encodes a multidomain therapeutic protein (or a multidomain therapeutic protein comprising a sequence) at least 95%, at least 96%, at least 97%, at least 98%, at least 99%, at least 99.5%, or 100% identical to any one of SEQ ID NOS: 570-573 (and, e.g., retaining the activity of native GAA). Optionally, the multidomain therapeutic protein coding sequence in the above examples encodes a multidomain therapeutic protein (or a multidomain therapeutic protein comprising a sequence) at least 99%, at least 99.5%, or 100% identical to any one of SEQ ID NOS: 570-573 (and, e.g., retaining the activity of native GAA). Optionally, the multidomain therapeutic protein coding sequence in the above examples encodes a multidomain therapeutic protein comprising the sequence set forth in any one of SEQ ID NOS: 570-573. Optionally, the multidomain therapeutic protein coding sequence in the above examples encodes a multidomain therapeutic protein consisting essentially of the sequence set forth in any one of SEQ ID NOS: 570-573. Optionally, the multidomain therapeutic protein coding sequence in the above examples encodes a multidomain therapeutic protein consisting of the sequence set forth in any one of SEQ ID NOS: 570-573.

[0439] Various codon optimized multidomain therapeutic protein coding sequences are provided. The multidomain therapeutic protein coding sequence can be, for example, CpG-depleted (e.g., fully CpG depleted) and/or codon optimized (e.g., CpG depleted (e.g., fully CpG-depleted) and codon optimized). In one example, the multidomain therapeutic protein coding sequence is (or comprises a sequence) at least 90%, at least 91%, at least 92%, at least 93%, at least 94%, at least 95%, at least 96%, at least 97%, at least 98%, at least 99%, at least 99.5%, or 100% identical to any one of SEQ ID NOS: 578-586. In another example, the multidomain therapeutic protein coding sequence is (or comprises a sequence) at least 95%, at least 96%, at least 97%, at least 98%, at least 99%, at least 99.5%, or 100% identical to any one of SEQ ID NOS: 578-586. In another example, the multidomain therapeutic protein coding sequence is (or comprises a sequence) at least 99%, at least 99.5%, or 100% identical to any one of SEQ ID NOS: 578-586. In another example, the multidomain therapeutic protein coding sequence comprises the sequence set forth in any one of SEQ ID NOS: 578-586. In another example, the multidomain therapeutic protein coding sequence consists essentially of the sequence set forth in any one of SEQ ID NOS: 578-586. In another example, the multidomain therapeutic protein coding sequence consists of the sequence set forth in any one of SEQ ID NOS: 578-586. Optionally, the multidomain therapeutic protein coding sequence encodes a multidomain therapeutic protein (or a multidomain therapeutic protein comprising a sequence) at least 90%, at least 91%, at least 92%, at least 93%, at least 94%, at least 95%, at least 96%, at least 97%, at least 98%, at least 99%, at least 99.5%, or 100% identical to any one of SEQ ID NOS: 570-573 (and, e.g., retaining the activity of native GAA). Optionally, the multidomain therapeutic protein coding sequence encodes a multidomain therapeutic protein (or a multidomain therapeutic protein comprising a sequence) at least 95%, at least 96%, at least 97%, at least 98%, at least 99%, at least 99.5%, or 100% identical to any one of SEQ ID NOS: 570-573 (and, e.g., retaining the activity of native GAA). Optionally, the GAA coding sequence in the above examples encodes a multidomain therapeutic protein (or a multidomain therapeutic protein comprising a sequence) at least 99%, at least 99.5%, or 100% identical to any one of SEQ ID NOS: 570-573 (and, e.g., retaining the activity of native GAA). Optionally, the multidomain therapeutic protein coding sequence in the above examples encodes a multidomain therapeutic protein comprising the sequence set forth in any one of SEQ ID NOS: 570-573. Optionally, the multidomain therapeutic protein coding sequence in the above examples encodes a multidomain therapeutic protein consisting essentially of the sequence set forth in any one of SEQ ID NOS: 570-573. Optionally, the multidomain therapeutic protein coding sequence in the above examples encodes a multidomain therapeutic protein consisting of the sequence set forth in any one of SEQ ID NOS: 570-573.

[0440] Various multidomain therapeutic protein coding sequences are provided. In one example, the multidomain therapeutic protein coding sequence is (or comprises a sequence) at least 90%, at least 91%, at least 92%, at least 93%, at least 94%, at least 95%, at least 96%, at least 97%, at least 98%, at least 99%, at least 99.5%, or 100% identical to any one of SEQ ID NOS: 577 and 584-586. In another example, the multidomain therapeutic protein coding sequence is (or comprises a sequence) at least 95%, at least 96%, at least 97%, at least 98%, at least 99%, at least 99.5%, or 100% identical to any one of SEQ ID NOS: 577 and 584-586. In another example, the multidomain therapeutic protein coding sequence is (or comprises a sequence) at least 99%, at least 99.5%, or 100% identical to any one of SEQ ID NOS: 577 and 584-586. In another example, the multidomain therapeutic protein coding sequence comprises the sequence set forth in any one of SEQ ID NOS: 577 and 584-586. In another example, the multidomain therapeutic protein coding sequence consists essentially of the sequence set forth in any one of SEQ ID NOS: 577 and 584-586. In another example, the multidomain therapeutic protein coding sequence consists of the sequence set forth in any one of SEQ ID NOS: 577 and 584-586. Optionally, the multidomain therapeutic protein coding sequence encodes a multidomain therapeutic protein (or a multidomain therapeutic protein comprising a sequence) at least 90%, at least 91%, at least 92%, at least 93%, at least 94%, at least 95%, at least 96%, at least 97%, at least 98%, at least 99%, at least 99.5%, or 100% identical to SEQ ID NO: 573 (and, e.g., retaining the activity of native GAA). Optionally, the multidomain therapeutic protein coding sequence encodes a multidomain therapeutic protein (or a multidomain therapeutic protein comprising a sequence) at least 95%, at least 96%, at least 97%, at least 98%, at least 99%, at least 99.5%, or 100% identical to SEQ ID NO: 573 (and, e.g., retaining the activity of native GAA). Optionally, the multidomain therapeutic protein coding sequence in the above examples encodes a multidomain therapeutic protein (or a multidomain therapeutic protein comprising a sequence) at least 99%, at least 99.5%, or 100% identical to SEQ ID NO: 573 (and, e.g., retaining the activity of native GAA). Optionally, the multidomain therapeutic protein coding sequence in the above examples encodes a multidomain therapeutic protein comprising the sequence set forth in SEQ ID NO: 573. Optionally, the multidomain therapeutic protein coding sequence in the above examples encodes a multidomain therapeutic protein consisting essentially of the sequence set forth in SEQ ID NO: 573. Optionally, the multidomain therapeutic protein coding sequence in the above examples encodes a multidomain therapeutic protein consisting of the sequence set forth in SEQ ID NO: 573.

[0441] Various codon optimized multidomain therapeutic protein coding sequences are provided. The multidomain therapeutic protein coding sequence can be, for example, CpG-depleted (e.g., fully CpG depleted) and/or codon optimized (e.g., CpG depleted (e.g., fully CpG-depleted) and codon optimized). In one example, the multidomain therapeutic protein coding sequence is (or comprises a sequence) at least 90%, at least 91%, at least 92%, at least 93%, at least 94%, at least 95%, at least 96%, at least 97%, at least 98%, at least 99%, at least 99.5%, or 100% identical to any one of SEQ ID NOS: 584-586. In another example, the multidomain therapeutic protein coding sequence is (or comprises a sequence) at least 95%, at least 96%, at least 97%, at least 98%, at least 99%, at least 99.5%, or 100% identical to any one of SEQ ID NOS: 584-586. In another example, the multidomain therapeutic protein coding sequence is (or comprises a sequence) at least 99%, at least 99.5%, or 100% identical to any one of SEQ ID NOS: 584-586. In another example, the multidomain therapeutic protein coding sequence comprises the sequence set forth in any one of SEQ ID NOS: 584-586. In another example, the multidomain therapeutic protein coding sequence consists essentially of the sequence set forth in any one of SEQ ID NOS: 584-586. In another example, the multidomain therapeutic protein coding sequence consists of the sequence set forth in any one of SEQ ID NOS: 584-586. Optionally, the multidomain therapeutic protein coding sequence encodes a multidomain therapeutic protein (or a multidomain therapeutic protein comprising a sequence) at least 90%, at least 91%, at least 92%, at least 93%, at least 94%, at least 95%, at least 96%, at least 97%, at least 98%, at least 99%, at least 99.5%, or 100% identical to SEQ ID NO: 573 (and, e.g., retaining the activity of native GAA). Optionally, the multidomain therapeutic protein coding sequence encodes a multidomain therapeutic protein (or a multidomain therapeutic protein comprising a sequence) at least 95%, at least 96%, at least 97%, at least 98%, at least 99%, at least 99.5%, or 100% identical to SEQ ID NO: 573 (and, e.g., retaining the activity of native GAA). Optionally, the GAA coding sequence in the above examples encodes a multidomain therapeutic protein (or a multidomain therapeutic protein comprising a sequence) at least 99%, at least 99.5%, or 100% identical to SEQ ID NO: 573 (and, e.g., retaining the activity of native GAA). Optionally, the multidomain therapeutic protein coding sequence in the above examples encodes a multidomain therapeutic protein comprising the sequence set forth in SEQ ID NO: 573. Optionally, the multidomain therapeutic protein coding sequence in the above examples encodes a multidomain therapeutic protein consisting essentially of the sequence set forth in SEQ ID NO: 573. Optionally, the multidomain therapeutic protein coding sequence in the above examples encodes a multidomain therapeutic protein consisting of the sequence set forth in SEQ ID NO: 573.

[0442] In one example, the multidomain therapeutic protein coding sequence is (or comprises a sequence) at least 90%, at least 91%, at least 92%, at least 93%, at least 94%, at least 95%, at least 96%, at least 97%, at least 98%, at least 99%, at least 99.5%, or 100% identical to SEQ ID NO: 584. In another example, the multidomain therapeutic protein coding sequence is (or comprises a sequence) at least 90%, at least 91%, at least 92%, at least 93%, at least 94%, at least 95%, at least 96%, at least 97%, at least 98%, at least 99%, at least 99.5%, or 100% identical to SEQ ID NO: 584 and encodes a multidomain therapeutic protein (or a multidomain therapeutic protein comprising a sequence) at least 99%, at least 99.5%, or 100% identical to SEQ ID NO: 573. In another example, the multidomain therapeutic protein coding sequence is (or comprises a sequence) at least 90%, at least 91%, at least 92%, at least 93%, at least 94%, at least 95%, at least 96%, at least 97%, at least 98%, at least 99%, at least 99.5%, or 100% identical to SEQ ID NO: 584 and encodes a multidomain therapeutic protein comprising the sequence set forth in SEQ ID NO: 573. In another example, the multidomain therapeutic protein coding sequence is (or comprises a sequence) at least 95%, at least 96%, at least 97%, at least 98%, at least 99%, at least 99.5%, or 100% identical to SEQ ID NO: 584. In another example, the multidomain therapeutic protein coding sequence is (or comprises a sequence) at least 95%, at least 96%, at least 97%, at least 98%, at least 99%, at least 99.5%, or 100% identical to SEQ ID NO: 584 and encodes a multidomain therapeutic protein (or a multidomain therapeutic protein comprising a sequence) at least 99%, at least 99.5%, or 100% identical to SEQ ID NO: 573. In another example, the multidomain therapeutic protein coding sequence is (or comprises a sequence) at least 95%, at least 96%, at least 97%, at least 98%, at least 99%, at least 99.5%, or 100% identical to SEQ ID NO: 584 and encodes a multidomain therapeutic protein comprising the sequence set forth in SEQ ID NO: 573. In another example, the multidomain therapeutic protein coding sequence is (or comprises a sequence) at least 99%, at least 99.5%, or 100% identical to SEQ ID NO: 584. In another example, the multidomain therapeutic protein coding sequence is (or comprises a sequence) at least 99%, at least 99.5%, or 100% identical to SEQ ID NO: 584 and encodes a multidomain therapeutic protein (or a multidomain therapeutic protein comprising a sequence) at least 99%, at least 99.5%, or 100% identical to SEQ ID NO: 573. In another example, the multidomain therapeutic protein coding sequence is (or comprises a sequence) at least 99%, at least 99.5%, or 100% identical to SEQ ID NO: 584 and encodes a multidomain therapeutic protein comprising the sequence set forth in SEQ ID NO: 573. In another example, the multidomain therapeutic protein coding sequence comprises the sequence set forth in SEQ ID NO: 584. In another example, the multidomain therapeutic protein coding sequence consists essentially of the sequence set forth in SEQ ID NO: 584. In another example, the multidomain therapeutic protein coding sequence consists of the sequence set forth in SEQ ID NO: 584. The multidomain therapeutic protein coding sequence can be, for example, CpG-depleted (e.g., fully CpG-depleted) and/or codon optimized. For example, the multidomain therapeutic protein coding sequence can be CpG depleted (e.g., fully CpG-depleted) and codon optimized. Optionally, the multidomain therapeutic protein coding sequence encodes a multidomain therapeutic protein (or a multidomain therapeutic protein comprising a sequence) at least 90%, at least 91%, at least 92%, at least 93%, at least 94%, at least 95%, at least 96%, at least 97%, at least 98%, at least 99%, at least 99.5%, or 100% identical to SEQ ID NO: 573 (and, e.g., retaining the activity of native GAA). Optionally, the multidomain therapeutic protein coding sequence encodes a multidomain therapeutic protein (or a multidomain therapeutic protein comprising a sequence) at least 95%, at least 96%, at least 97%, at least 98%, at least 99%, at least 99.5%, or 100% identical to SEQ ID NO: 573 (and, e.g., retaining the activity of native GAA). Optionally, the multidomain therapeutic protein coding sequence in the above examples encodes a multidomain therapeutic protein (or a multidomain therapeutic protein comprising a sequence) at least 99%, at least 99.5%, or 100% identical to SEQ ID NO: 573 (and, e.g., retaining the activity of native GAA). Optionally, the multidomain therapeutic protein coding sequence in the above examples encodes a multidomain therapeutic protein comprising the sequence set forth in SEQ ID NO: 573. Optionally, the multidomain therapeutic protein coding sequence in the above examples encodes a multidomain therapeutic protein consisting essentially of the sequence set forth in SEQ ID NO: 573. Optionally, the multidomain therapeutic protein coding sequence in the above examples encodes a multidomain therapeutic protein consisting of the sequence set forth in SEQ ID NO: 573.

[0443] The nucleic acid construct can comprise, for example, (1) a 5′ ITR (e.g., such as the one set forth in SEQ ID NO: 160), (2) a splice acceptor site (e.g., a mouse Alb exon 2 splice acceptor, such as the one set forth in SEQ ID NO: 163), (3) the multidomain therapeutic protein coding sequence, (4) a polyadenylation signal (e.g., an SV40 polyadenylation signal, such as the one set forth in SEQ ID NO: 712), and (5) a 3′ ITR (e.g., such as the one set forth in SEQ ID NO: 160 or the reverse complement thereof). In one example, the nucleic acid construct comprises a sequence at least 90%, at least 91%, at least 92%, at least 93%, at least 94%, at least 95%, at least 96%, at least 97%, at least 98%, at least 99%, at least 99.5%, or 100% identical to SEQ ID NO: 733. In another example, the nucleic acid construct comprises a sequence at least 90%, at least 91%, at least 92%, at least 93%, at least 94%, at least 95%, at least 96%, at least 97%, at least 98%, at least 99%, at least 99.5%, or 100% identical to SEQ ID NO: 733 and encodes a multidomain therapeutic protein (or a multidomain therapeutic protein comprising a sequence) at least 99%, at least 99.5%, or 100% identical to SEQ ID NO: 573. In another example, the nucleic acid construct comprises a sequence at least 90%, at least 91%, at least 92%, at least 93%, at least 94%, at least 95%, at least 96%, at least 97%, at least 98%, at least 99%, at least 99.5%, or 100% identical to SEQ ID NO: 733 and encodes a multidomain therapeutic protein comprising the sequence set forth in SEQ ID NO: 573. In another example, the nucleic acid construct comprises a sequence at least 95%, at least 96%, at least 97%, at least 98%, at least 99%, at least 99.5%, or 100% identical to SEQ ID NO: 733. In another example, the nucleic acid construct comprises a sequence at least 95%, at least 96%, at least 97%, at least 98%, at least 99%, at least 99.5%, or 100% identical to SEQ ID NO: 733 and encodes a multidomain therapeutic protein (or a multidomain therapeutic protein comprising a sequence) at least 99%, at least 99.5%, or 100% identical to SEQ ID NO: 573. In another example, the nucleic acid construct comprises a sequence at least 95%, at least 96%, at least 97%, at least 98%, at least 99%, at least 99.5%, or 100% identical to SEQ ID NO: 733 and encodes a multidomain therapeutic protein comprising the sequence set forth in SEQ ID NO: 573. In another example, the nucleic acid construct comprises a sequence at least 99%, at least 99.5%, or 100% identical to SEQ ID NO: 733. In another example, the nucleic acid construct comprises a sequence at least 99%, at least 99.5%, or 100% identical to SEQ ID NO: 733 and encodes a multidomain therapeutic protein (or a multidomain therapeutic protein comprising a sequence) at least 99%, at least 99.5%, or 100% identical to SEQ ID NO: 573. In another example, the nucleic acid construct comprises a sequence at least 99%, at least 99.5%, or 100% identical to SEQ ID NO: 733 and encodes a multidomain therapeutic protein comprising the sequence set forth in SEQ ID NO: 573. In another example, the nucleic acid construct comprises the sequence set forth in SEQ ID NO: 733. The multidomain therapeutic protein coding sequence can be, for example, CpG-depleted (e.g., fully CpG-depleted) and/or codon optimized. For example, the multidomain therapeutic protein coding sequence can be CpG depleted (e.g., fully CpG-depleted) and codon optimized. Optionally, the nucleic acid construct encodes a multidomain therapeutic protein (or a multidomain therapeutic protein comprising a sequence) at least 90%, at least 91%, at least 92%, at least 93%, at least 94%, at least 95%, at least 96%, at least 97%, at least 98%, at least 99%, at least 99.5%, or 100% identical to SEQ ID NO: 573 (and, e.g., retaining the activity of native GAA). Optionally, the nucleic acid construct encodes a multidomain therapeutic protein (or a multidomain therapeutic protein comprising a sequence) at least 95%, at least 96%, at least 97%, at least 98%, at least 99%, at least 99.5%, or 100% identical to SEQ ID NO: 573 (and, e.g., retaining the activity of native GAA). Optionally, the nucleic acid construct in the above examples encodes a multidomain therapeutic protein (or a multidomain therapeutic protein comprising a sequence) at least 99%, at least 99.5%, or 100% identical to SEQ ID NO: 573 (and, e.g., retaining the activity of native GAA). Optionally, the nucleic acid construct in the above examples encodes a multidomain therapeutic protein comprising the sequence set forth in SEQ ID NO: 573. Optionally, the nucleic acid construct in the above examples encodes a multidomain therapeutic protein consisting essentially of the sequence set forth in SEQ ID NO: 573. Optionally, the nucleic acid construct in the above examples encodes a multidomain therapeutic protein consisting of the sequence set forth in SEQ ID NO: 573.

[0444] In one example, the multidomain therapeutic protein coding sequence is (or comprises a sequence) at least 90%, at least 91%, at least 92%, at least 93%, at least 94%, at least 95%, at least 96%, at least 97%, at least 98%, at least 99%, at least 99.5%, or 100% identical to SEQ ID NO: 585. In another example, the multidomain therapeutic protein coding sequence is (or comprises a sequence) at least 90%, at least 91%, at least 92%, at least 93%, at least 94%, at least 95%, at least 96%, at least 97%, at least 98%, at least 99%, at least 99.5%, or 100% identical to SEQ ID NO: 585 and encodes a multidomain therapeutic protein (or a multidomain therapeutic protein comprising a sequence) at least 99%, at least 99.5%, or 100% identical to SEQ ID NO: 573. In another example, the multidomain therapeutic protein coding sequence is (or comprises a sequence) at least 90%, at least 91%, at least 92%, at least 93%, at least 94%, at least 95%, at least 96%, at least 97%, at least 98%, at least 99%, at least 99.5%, or 100% identical to SEQ ID NO: 585 and encodes a multidomain therapeutic protein comprising the sequence set forth in SEQ ID NO: 573. In another example, the multidomain therapeutic protein coding sequence is (or comprises a sequence) at least 95%, at least 96%, at least 97%, at least 98%, at least 99%, at least 99.5%, or 100% identical to SEQ ID NO: 585. In another example, the multidomain therapeutic protein coding sequence is (or comprises a sequence) at least 95%, at least 96%, at least 97%, at least 98%, at least 99%, at least 99.5%, or 100% identical to SEQ ID NO: 585 and encodes a multidomain therapeutic protein (or a multidomain therapeutic protein comprising a sequence) at least 99%, at least 99.5%, or 100% identical to SEQ ID NO: 573. In another example, the multidomain therapeutic protein coding sequence is (or comprises a sequence) at least 95%, at least 96%, at least 97%, at least 98%, at least 99%, at least 99.5%, or 100% identical to SEQ ID NO: 585 and encodes a multidomain therapeutic protein comprising the sequence set forth in SEQ ID NO: 573. In another example, the multidomain therapeutic protein coding sequence is (or comprises a sequence) at least 99%, at least 99.5%, or 100% identical to SEQ ID NO: 585. In another example, the multidomain therapeutic protein coding sequence is (or comprises a sequence) at least 99%, at least 99.5%, or 100% identical to SEQ ID NO: 585 and encodes a multidomain therapeutic protein (or a multidomain therapeutic protein comprising a sequence) at least 99%, at least 99.5%, or 100% identical to SEQ ID NO: 573. In another example, the multidomain therapeutic protein coding sequence is (or comprises a sequence) at least 99%, at least 99.5%, or 100% identical to SEQ ID NO: 585 and encodes a multidomain therapeutic protein comprising the sequence set forth in SEQ ID NO: 573. In another example, the multidomain therapeutic protein coding sequence comprises the sequence set forth in SEQ ID NO: 585. In another example, the multidomain therapeutic protein coding sequence consists essentially of the sequence set forth in SEQ ID NO: 585. In another example, the multidomain therapeutic protein coding sequence consists of the sequence set forth in SEQ ID NO: 585. The multidomain therapeutic protein coding sequence can be, for example, CpG-depleted (e.g., fully CpG-depleted) and/or codon optimized. For example, the multidomain therapeutic protein coding sequence can be CpG depleted (e.g., fully CpG-depleted) and codon optimized. Optionally, the multidomain therapeutic protein coding sequence encodes a multidomain therapeutic protein (or a multidomain therapeutic protein comprising a sequence) at least 90%, at least 91%, at least 92%, at least 93%, at least 94%, at least 95%, at least 96%, at least 97%, at least 98%, at least 99%, at least 99.5%, or 100% identical to SEQ ID NO: 573 (and, e.g., retaining the activity of native GAA). Optionally, the multidomain therapeutic protein coding sequence encodes a multidomain therapeutic protein (or a multidomain therapeutic protein comprising a sequence) at least 95%, at least 96%, at least 97%, at least 98%, at least 99%, at least 99.5%, or 100% identical to SEQ ID NO: 573 (and, e.g., retaining the activity of native GAA). Optionally, the multidomain therapeutic protein coding sequence in the above examples encodes a multidomain therapeutic protein (or a multidomain therapeutic protein comprising a sequence) at least 99%, at least 99.5%, or 100% identical to SEQ ID NO: 573 (and, e.g., retaining the activity of native GAA). Optionally, the multidomain therapeutic protein coding sequence in the above examples encodes a multidomain therapeutic protein comprising the sequence set forth in SEQ ID NO: 573. Optionally, the multidomain therapeutic protein coding sequence in the above examples encodes a multidomain therapeutic protein consisting essentially of the sequence set forth in SEQ ID NO: 573. Optionally, the multidomain therapeutic protein coding sequence in the above examples encodes a multidomain therapeutic protein consisting of the sequence set forth in SEQ ID NO: 573.

[0445] The nucleic acid construct can comprise, for example, (1) a 5′ ITR (e.g., such as the one set forth in SEQ ID NO: 160), (2) a splice acceptor site (e.g., a mouse Alb exon 2 splice acceptor, such as the one set forth in SEQ ID NO: 163), (3) the multidomain therapeutic protein coding sequence, (4) a polyadenylation signal (e.g., an SV40 polyadenylation signal, such as the one set forth in SEQ ID NO: 712), and (5) a 3′ ITR (e.g., such as the one set forth in SEQ ID NO: 160 or the reverse complement thereof). In one example, the nucleic acid construct comprises a sequence at least 90%, at least 91%, at least 92%, at least 93%, at least 94%, at least 95%, at least 96%, at least 97%, at least 98%, at least 99%, at least 99.5%, or 100% identical to SEQ ID NO: 734. In another example, the nucleic acid construct comprises a sequence at least 90%, at least 91%, at least 92%, at least 93%, at least 94%, at least 95%, at least 96%, at least 97%, at least 98%, at least 99%, at least 99.5%, or 100% identical to SEQ ID NO: 734 and encodes a multidomain therapeutic protein (or a multidomain therapeutic protein comprising a sequence) at least 99%, at least 99.5%, or 100% identical to SEQ ID NO: 573. In another example, the nucleic acid construct comprises a sequence at least 90%, at least 91%, at least 92%, at least 93%, at least 94%, at least 95%, at least 96%, at least 97%, at least 98%, at least 99%, at least 99.5%, or 100% identical to SEQ ID NO: 734 and encodes a multidomain therapeutic protein comprising the sequence set forth in SEQ ID NO: 573. In another example, the nucleic acid construct comprises a sequence at least 95%, at least 96%, at least 97%, at least 98%, at least 99%, at least 99.5%, or 100% identical to SEQ ID NO: 734. In another example, the nucleic acid construct comprises a sequence at least 95%, at least 96%, at least 97%, at least 98%, at least 99%, at least 99.5%, or 100% identical to SEQ ID NO: 734 and encodes a multidomain therapeutic protein (or a multidomain therapeutic protein comprising a sequence) at least 99%, at least 99.5%, or 100% identical to SEQ ID NO: 573. In another example, the nucleic acid construct comprises a sequence at least 95%, at least 96%, at least 97%, at least 98%, at least 99%, at least 99.5%, or 100% identical to SEQ ID NO: 734 and encodes a multidomain therapeutic protein comprising the sequence set forth in SEQ ID NO: 573. In another example, the nucleic acid construct comprises a sequence at least 99%, at least 99.5%, or 100% identical to SEQ ID NO: 734. In another example, the nucleic acid construct comprises a sequence at least 99%, at least 99.5%, or 100% identical to SEQ ID NO: 734 and encodes a multidomain therapeutic protein (or a multidomain therapeutic protein comprising a sequence) at least 99%, at least 99.5%, or 100% identical to SEQ ID NO: 573. In another example, the nucleic acid construct comprises a sequence at least 99%, at least 99.5%, or 100% identical to SEQ ID NO: 734 and encodes a multidomain therapeutic protein comprising the sequence set forth in SEQ ID NO: 573. In another example, the nucleic acid construct comprises the sequence set forth in SEQ ID NO: 734. The multidomain therapeutic protein coding sequence can be, for example, CpG-depleted (e.g., fully CpG-depleted) and/or codon optimized. For example, the multidomain therapeutic protein coding sequence can be CpG depleted (e.g., fully CpG-depleted) and codon optimized. Optionally, the nucleic acid construct encodes a multidomain therapeutic protein (or a multidomain therapeutic protein comprising a sequence) at least 90%, at least 91%, at least 92%, at least 93%, at least 94%, at least 95%, at least 96%, at least 97%, at least 98%, at least 99%, at least 99.5%, or 100% identical to SEQ ID NO: 573 (and, e.g., retaining the activity of native GAA). Optionally, the nucleic acid construct encodes a multidomain therapeutic protein (or a multidomain therapeutic protein comprising a sequence) at least 95%, at least 96%, at least 97%, at least 98%, at least 99%, at least 99.5%, or 100% identical to SEQ ID NO: 573 (and, e.g., retaining the activity of native GAA). Optionally, the nucleic acid construct in the above examples encodes a multidomain therapeutic protein (or a multidomain therapeutic protein comprising a sequence) at least 99%, at least 99.5%, or 100% identical to SEQ ID NO: 573 (and, e.g., retaining the activity of native GAA). Optionally, the nucleic acid construct in the above examples encodes a multidomain therapeutic protein comprising the sequence set forth in SEQ ID NO: 573. Optionally, the nucleic acid construct in the above examples encodes a multidomain therapeutic protein consisting essentially of the sequence set forth in SEQ ID NO: 573. Optionally, the nucleic acid construct in the above examples encodes a multidomain therapeutic protein consisting of the sequence set forth in SEQ ID NO: 573.

[0446] In one example, the multidomain therapeutic protein coding sequence is (or comprises a sequence) at least 90%, at least 91%, at least 92%, at least 93%, at least 94%, at least 95%, at least 96%, at least 97%, at least 98%, at least 99%, at least 99.5%, or 100% identical to SEQ ID NO: 586. In another example, the multidomain therapeutic protein coding sequence is (or comprises a sequence) at least 90%, at least 91%, at least 92%, at least 93%, at least 94%, at least 95%, at least 96%, at least 97%, at least 98%, at least 99%, at least 99.5%, or 100% identical to SEQ ID NO: 586 and encodes a multidomain therapeutic protein (or a multidomain therapeutic protein comprising a sequence) at least 99%, at least 99.5%, or 100% identical to SEQ ID NO: 573. In another example, the multidomain therapeutic protein coding sequence is (or comprises a sequence) at least 90%, at least 91%, at least 92%, at least 93%, at least 94%, at least 95%, at least 96%, at least 97%, at least 98%, at least 99%, at least 99.5%, or 100% identical to SEQ ID NO: 586 and encodes a multidomain therapeutic protein comprising the sequence set forth in SEQ ID NO: 573. In another example, the multidomain therapeutic protein coding sequence is (or comprises a sequence) at least 95%, at least 96%, at least 97%, at least 98%, at least 99%, at least 99.5%, or 100% identical to SEQ ID NO: 586. In another example, the multidomain therapeutic protein coding sequence is (or comprises a sequence) at least 95%, at least 96%, at least 97%, at least 98%, at least 99%, at least 99.5%, or 100% identical to SEQ ID NO: 586 and encodes a multidomain therapeutic protein (or a multidomain therapeutic protein comprising a sequence) at least 99%, at least 99.5%, or 100% identical to SEQ ID NO: 573. In another example, the multidomain therapeutic protein coding sequence is (or comprises a sequence) at least 95%, at least 96%, at least 97%, at least 98%, at least 99%, at least 99.5%, or 100% identical to SEQ ID NO: 586 and encodes a multidomain therapeutic protein comprising the sequence set forth in SEQ ID NO: 573. In another example, the multidomain therapeutic protein coding sequence is (or comprises a sequence) at least 99%, at least 99.5%, or 100% identical to SEQ ID NO: 586. In another example, the multidomain therapeutic protein coding sequence is (or comprises a sequence) at least 99%, at least 99.5%, or 100% identical to SEQ ID NO: 586 and encodes a multidomain therapeutic protein (or a multidomain therapeutic protein comprising a sequence) at least 99%, at least 99.5%, or 100% identical to SEQ ID NO: 573. In another example, the multidomain therapeutic protein coding sequence is (or comprises a sequence) at least 99%, at least 99.5%, or 100% identical to SEQ ID NO: 586 and encodes a multidomain therapeutic protein comprising the sequence set forth in SEQ ID NO: 573. In another example, the multidomain therapeutic protein coding sequence comprises the sequence set forth in SEQ ID NO: 586. In another example, the multidomain therapeutic protein coding sequence consists essentially of the sequence set forth in SEQ ID NO: 586. In another example, the multidomain therapeutic protein coding sequence consists of the sequence set forth in SEQ ID NO: 586. The multidomain therapeutic protein coding sequence can be, for example, CpG-depleted (e.g., fully CpG-depleted) and/or codon optimized. For example, the multidomain therapeutic protein coding sequence can be CpG depleted (e.g., fully CpG-depleted) and codon optimized. Optionally, the multidomain therapeutic protein coding sequence encodes a multidomain therapeutic protein (or a multidomain therapeutic protein comprising a sequence) at least 90%, at least 91%, at least 92%, at least 93%, at least 94%, at least 95%, at least 96%, at least 97%, at least 98%, at least 99%, at least 99.5%, or 100% identical to SEQ ID NO: 573 (and, e.g., retaining the activity of native GAA). Optionally, the multidomain therapeutic protein coding sequence encodes a multidomain therapeutic protein (or a multidomain therapeutic protein comprising a sequence) at least 95%, at least 96%, at least 97%, at least 98%, at least 99%, at least 99.5%, or 100% identical to SEQ ID NO: 573 (and, e.g., retaining the activity of native GAA). Optionally, the multidomain therapeutic protein coding sequence in the above examples encodes a multidomain therapeutic protein (or a multidomain therapeutic protein comprising a sequence) at least 99%, at least 99.5%, or 100% identical to SEQ ID NO: 573 (and, e.g., retaining the activity of native GAA). Optionally, the multidomain therapeutic protein coding sequence in the above examples encodes a multidomain therapeutic protein comprising the sequence set forth in SEQ ID NO: 573. Optionally, the multidomain therapeutic protein coding sequence in the above examples encodes a multidomain therapeutic protein consisting essentially of the sequence set forth in SEQ ID NO: 573. Optionally, the multidomain therapeutic protein coding sequence in the above examples encodes a multidomain therapeutic protein consisting of the sequence set forth in SEQ ID NO: 573.

[0447] The nucleic acid construct can comprise, for example, (1) a 5′ ITR (e.g., such as the one set forth in SEQ ID NO: 160), (2) a splice acceptor site (e.g., a mouse Alb exon 2 splice acceptor, such as the one set forth in SEQ ID NO: 163), (3) the multidomain therapeutic protein coding sequence, (4) a polyadenylation signal (e.g., an SV40 polyadenylation signal, such as the one set forth in SEQ ID NO: 712), and (5) a 3′ ITR (e.g., such as the one set forth in SEQ ID NO: 160 or the reverse complement thereof). In one example, the nucleic acid construct comprises a sequence at least 90%, at least 91%, at least 92%, at least 93%, at least 94%, at least 95%, at least 96%, at least 97%, at least 98%, at least 99%, at least 99.5%, or 100% identical to SEQ ID NO: 735. In another example, the nucleic acid construct comprises a sequence at least 90%, at least 91%, at least 92%, at least 93%, at least 94%, at least 95%, at least 96%, at least 97%, at least 98%, at least 99%, at least 99.5%, or 100% identical to SEQ ID NO: 735 and encodes a multidomain therapeutic protein (or a multidomain therapeutic protein comprising a sequence) at least 99%, at least 99.5%, or 100% identical to SEQ ID NO: 573. In another example, the nucleic acid construct comprises a sequence at least 90%, at least 91%, at least 92%, at least 93%, at least 94%, at least 95%, at least 96%, at least 97%, at least 98%, at least 99%, at least 99.5%, or 100% identical to SEQ ID NO: 735 and encodes a multidomain therapeutic protein comprising the sequence set forth in SEQ ID NO: 573. In another example, the nucleic acid construct comprises a sequence at least 95%, at least 96%, at least 97%, at least 98%, at least 99%, at least 99.5%, or 100% identical to SEQ ID NO: 735. In another example, nucleic acid construct comprises a sequence at least 95%, at least 96%, at least 97%, at least 98%, at least 99%, at least 99.5%, or 100% identical to SEQ ID NO: 735 and encodes a multidomain therapeutic protein (or a multidomain therapeutic protein comprising a sequence) at least 99%, at least 99.5%, or 100% identical to SEQ ID NO: 573. In another example, the nucleic acid construct comprises a sequence at least 95%, at least 96%, at least 97%, at least 98%, at least 99%, at least 99.5%, or 100% identical to SEQ ID NO: 735 and encodes a multidomain therapeutic protein comprising the sequence set forth in SEQ ID NO: 573. In another example, the nucleic acid construct comprises a sequence at least 99%, at least 99.5%, or 100% identical to SEQ ID NO: 735. In another example, the nucleic acid construct comprises a sequence at least 99%, at least 99.5%, or 100% identical to SEQ ID NO: 735 and encodes a multidomain therapeutic protein (or a multidomain therapeutic protein comprising a sequence) at least 99%, at least 99.5%, or 100% identical to SEQ ID NO: 573. In another example, the nucleic acid construct comprises a sequence at least 99%, at least 99.5%, or 100% identical to SEQ ID NO: 735 and encodes a multidomain therapeutic protein comprising the sequence set forth in SEQ ID NO: 573. In another example, the nucleic acid construct comprises the sequence set forth in SEQ ID NO: 735. The multidomain therapeutic protein coding sequence can be, for example, CpG-depleted (e.g., fully CpG-depleted) and/or codon optimized. For example, the multidomain therapeutic protein coding sequence can be CpG depleted (e.g., fully CpG-depleted) and codon optimized. Optionally, the nucleic acid construct encodes a multidomain therapeutic protein (or a multidomain therapeutic protein comprising a sequence) at least 90%, at least 91%, at least 92%, at least 93%, at least 94%, at least 95%, at least 96%, at least 97%, at least 98%, at least 99%, at least 99.5%, or 100% identical to SEQ ID NO: 573 (and, e.g., retaining the activity of native GAA). Optionally, the nucleic acid construct encodes a multidomain therapeutic protein (or a multidomain therapeutic protein comprising a sequence) at least 95%, at least 96%, at least 97%, at least 98%, at least 99%, at least 99.5%, or 100% identical to SEQ ID NO: 573 (and, e.g., retaining the activity of native GAA). Optionally, the nucleic acid construct in the above examples encodes a multidomain therapeutic protein (or a multidomain therapeutic protein comprising a sequence) at least 99%, at least 99.5%, or 100% identical to SEQ ID NO: 573 (and, e.g., retaining the activity of native GAA). Optionally, the nucleic acid construct in the above examples encodes a multidomain therapeutic protein comprising the sequence set forth in SEQ ID NO: 573. Optionally, the nucleic acid construct in the above examples encodes a multidomain therapeutic protein consisting essentially of the sequence set forth in SEQ ID NO: 573. Optionally, the nucleic acid construct in the above examples encodes a multidomain therapeutic protein consisting of the sequence set forth in SEQ ID NO: 573.

[0448] Various multidomain therapeutic protein coding sequences are provided. In one example, the multidomain therapeutic protein coding sequence is (or comprises a sequence) at least 90%, at least 91%, at least 92%, at least 93%, at least 94%, at least 95%, at least 96%, at least 97%, at least 98%, at least 99%, at least 99.5%, or 100% identical to any one of SEQ ID NOS: 576 and 581-583. In another example, the multidomain therapeutic protein coding sequence is (or comprises a sequence) at least 95%, at least 96%, at least 97%, at least 98%, at least 99%, at least 99.5%, or 100% identical to any one of SEQ ID NOS: 576 and 581-583. In another example, the multidomain therapeutic protein coding sequence is (or comprises a sequence) at least 99%, at least 99.5%, or 100% identical to any one of SEQ ID NOS: 576 and 581-583. In another example, the multidomain therapeutic protein coding sequence comprises the sequence set forth in any one of SEQ ID NOS: 576 and 581-583. In another example, the multidomain therapeutic protein coding sequence consists essentially of the sequence set forth in any one of SEQ ID NOS: 576 and 581-583. In another example, the multidomain therapeutic protein coding sequence consists of the sequence set forth in any one of SEQ ID NOS: 576 and 581-583. Optionally, the multidomain therapeutic protein coding sequence encodes a multidomain therapeutic protein (or a multidomain therapeutic protein comprising a sequence) at least 90%, at least 91%, at least 92%, at least 93%, at least 94%, at least 95%, at least 96%, at least 97%, at least 98%, at least 99%, at least 99.5%, or 100% identical to SEQ ID NO: 572 (and, e.g., retaining the activity of native GAA). Optionally, the multidomain therapeutic protein coding sequence encodes a multidomain therapeutic protein (or a multidomain therapeutic protein comprising a sequence) at least 95%, at least 96%, at least 97%, at least 98%, at least 99%, at least 99.5%, or 100% identical to SEQ ID NO: 572 (and, e.g., retaining the activity of native GAA). Optionally, the multidomain therapeutic protein coding sequence in the above examples encodes a multidomain therapeutic protein (or a multidomain therapeutic protein comprising a sequence) at least 99%, at least 99.5%, or 100% identical to SEQ ID NO: 572 (and, e.g., retaining the activity of native GAA). Optionally, the multidomain therapeutic protein coding sequence in the above examples encodes a multidomain therapeutic protein comprising the sequence set forth in SEQ ID NO: 572. Optionally, the multidomain therapeutic protein coding sequence in the above examples encodes a multidomain therapeutic protein consisting essentially of the sequence set forth in SEQ ID NO: 572. Optionally, the multidomain therapeutic protein coding sequence in the above examples encodes a multidomain therapeutic protein consisting of the sequence set forth in SEQ ID NO: 572.

[0449] Various codon optimized multidomain therapeutic protein coding sequences are provided. The multidomain therapeutic protein coding sequence can be, for example, CpG-depleted (e.g., fully CpG depleted) and/or codon optimized (e.g., CpG depleted (e.g., fully CpG-depleted) and codon optimized). In one example, the multidomain therapeutic protein coding sequence is (or comprises a sequence) at least 90%, at least 91%, at least 92%, at least 93%, at least 94%, at least 95%, at least 96%, at least 97%, at least 98%, at least 99%, at least 99.5%, or 100% identical to any one of SEQ ID NOS: 581-583. In another example, the multidomain therapeutic protein coding sequence is (or comprises a sequence) at least 95%, at least 96%, at least 97%, at least 98%, at least 99%, at least 99.5%, or 100% identical to any one of SEQ ID NOS: 581-583. In another example, the multidomain therapeutic protein coding sequence is (or comprises a sequence) at least 99%, at least 99.5%, or 100% identical to any one of SEQ ID NOS: 581-583. In another example, the multidomain therapeutic protein coding sequence comprises the sequence set forth in any one of SEQ ID NOS: 581-583. In another example, the multidomain therapeutic protein coding sequence consists essentially of the sequence set forth in any one of SEQ ID NOS: 581-583. In another example, the multidomain therapeutic protein coding sequence consists of the sequence set forth in any one of SEQ ID NOS: 581-583. Optionally, the multidomain therapeutic protein coding sequence encodes a multidomain therapeutic protein (or a multidomain therapeutic protein comprising a sequence) at least 90%, at least 91%, at least 92%, at least 93%, at least 94%, at least 95%, at least 96%, at least 97%, at least 98%, at least 99%, at least 99.5%, or 100% identical to SEQ ID NO: 572 (and, e.g., retaining the activity of native GAA). Optionally, the multidomain therapeutic protein coding sequence encodes a multidomain therapeutic protein (or a multidomain therapeutic protein comprising a sequence) at least 95%, at least 96%, at least 97%, at least 98%, at least 99%, at least 99.5%, or 100% identical to SEQ ID NO: 572 (and, e.g., retaining the activity of native GAA). Optionally, the GAA coding sequence in the above examples encodes a multidomain therapeutic protein (or a multidomain therapeutic protein comprising a sequence) at least 99%, at least 99.5%, or 100% identical to SEQ ID NO: 572 (and, e.g., retaining the activity of native GAA). Optionally, the multidomain therapeutic protein coding sequence in the above examples encodes a multidomain therapeutic protein comprising the sequence set forth in SEQ ID NO: 572. Optionally, the multidomain therapeutic protein coding sequence in the above examples encodes a multidomain therapeutic protein consisting essentially of the sequence set forth in SEQ ID NO: 572. Optionally, the multidomain therapeutic protein coding sequence in the above examples encodes a multidomain therapeutic protein consisting of the sequence set forth in SEQ ID NO: 572.

[0450] In one example, the multidomain therapeutic protein coding sequence is (or comprises a sequence) at least 90%, at least 91%, at least 92%, at least 93%, at least 94%, at least 95%, at least 96%, at least 97%, at least 98%, at least 99%, at least 99.5%, or 100% identical to SEQ ID NO: 581. In another example, the multidomain therapeutic protein coding sequence is (or comprises a sequence) at least 90%, at least 91%, at least 92%, at least 93%, at least 94%, at least 95%, at least 96%, at least 97%, at least 98%, at least 99%, at least 99.5%, or 100% identical to SEQ ID NO: 581 and encodes a multidomain therapeutic protein (or a multidomain therapeutic protein comprising a sequence) at least 99%, at least 99.5%, or 100% identical to SEQ ID NO: 572. In another example, the multidomain therapeutic protein coding sequence is (or comprises a sequence) at least 90%, at least 91%, at least 92%, at least 93%, at least 94%, at least 95%, at least 96%, at least 97%, at least 98%, at least 99%, at least 99.5%, or 100% identical to SEQ ID NO: 581 and encodes a multidomain therapeutic protein comprising the sequence set forth in SEQ ID NO: 572. In another example, the multidomain therapeutic protein coding sequence is (or comprises a sequence) at least 95%, at least 96%, at least 97%, at least 98%, at least 99%, at least 99.5%, or 100% identical to SEQ ID NO: 581. In another example, the multidomain therapeutic protein coding sequence is (or comprises a sequence) at least 95%, at least 96%, at least 97%, at least 98%, at least 99%, at least 99.5%, or 100% identical to SEQ ID NO: 581 and encodes a multidomain therapeutic protein (or a multidomain therapeutic protein comprising a sequence) at least 99%, at least 99.5%, or 100% identical to SEQ ID NO: 572. In another example, the multidomain therapeutic protein coding sequence is (or comprises a sequence) at least 95%, at least 96%, at least 97%, at least 98%, at least 99%, at least 99.5%, or 100% identical to SEQ ID NO: 581 and encodes a multidomain therapeutic protein comprising the sequence set forth in SEQ ID NO: 572. In another example, the multidomain therapeutic protein coding sequence is (or comprises a sequence) at least 99%, at least 99.5%, or 100% identical to SEQ ID NO: 581. In another example, the multidomain therapeutic protein coding sequence is (or comprises a sequence) at least 99%, at least 99.5%, or 100% identical to SEQ ID NO: 581 and encodes a multidomain therapeutic protein (or a multidomain therapeutic protein comprising a sequence) at least 99%, at least 99.5%, or 100% identical to SEQ ID NO: 572. In another example, the multidomain therapeutic protein coding sequence is (or comprises a sequence) at least 99%, at least 99.5%, or 100% identical to SEQ ID NO: 581 and encodes a multidomain therapeutic protein comprising the sequence set forth in SEQ ID NO: 572. In another example, the multidomain therapeutic protein coding sequence comprises the sequence set forth in SEQ ID NO: 581. In another example, the multidomain therapeutic protein coding sequence consists essentially of the sequence set forth in SEQ ID NO: 581. In another example, the multidomain therapeutic protein coding sequence consists of the sequence set forth in SEQ ID NO: 581. The multidomain therapeutic protein coding sequence can be, for example, CpG-depleted (e.g., fully CpG-depleted) and/or codon optimized. For example, the multidomain therapeutic protein coding sequence can be CpG depleted (e.g., fully CpG-depleted) and codon optimized. Optionally, the multidomain therapeutic protein coding sequence encodes a multidomain therapeutic protein (or a multidomain therapeutic protein comprising a sequence) at least 90%, at least 91%, at least 92%, at least 93%, at least 94%, at least 95%, at least 96%, at least 97%, at least 98%, at least 99%, at least 99.5%, or 100% identical to SEQ ID NO: 572 (and, e.g., retaining the activity of native GAA). Optionally, the multidomain therapeutic protein coding sequence encodes a multidomain therapeutic protein (or a multidomain therapeutic protein comprising a sequence) at least 95%, at least 96%, at least 97%, at least 98%, at least 99%, at least 99.5%, or 100% identical to SEQ ID NO: 572 (and, e.g., retaining the activity of native GAA). Optionally, the multidomain therapeutic protein coding sequence in the above examples encodes a multidomain therapeutic protein (or a multidomain therapeutic protein comprising a sequence) at least 99%, at least 99.5%, or 100% identical to SEQ ID NO: 572 (and, e.g., retaining the activity of native GAA). Optionally, the multidomain therapeutic protein coding sequence in the above examples encodes a multidomain therapeutic protein comprising the sequence set forth in SEQ ID NO: 572. Optionally, the multidomain therapeutic protein coding sequence in the above examples encodes a multidomain therapeutic protein consisting essentially of the sequence set forth in SEQ ID NO: 572. Optionally, the multidomain therapeutic protein coding sequence in the above examples encodes a multidomain therapeutic protein consisting of the sequence set forth in SEQ ID NO: 572.

[0451] The nucleic acid construct can comprise, for example, (1) a 5′ ITR (e.g., such as the one set forth in SEQ ID NO: 160), (2) a splice acceptor site (e.g., a mouse Alb exon 2 splice acceptor, such as the one set forth in SEQ ID NO: 163), (3) the multidomain therapeutic protein coding sequence, (4) a polyadenylation signal (e.g., an SV40 polyadenylation signal, such as the one set forth in SEQ ID NO: 712), and (5) a 3′ ITR (e.g., such as the one set forth in SEQ ID NO: 160 or the reverse complement thereof). In one example, the nucleic acid construct comprises a sequence at least 90%, at least 91%, at least 92%, at least 93%, at least 94%, at least 95%, at least 96%, at least 97%, at least 98%, at least 99%, at least 99.5%, or 100% identical to SEQ ID NO: 729. In another example, the nucleic acid construct comprises a sequence at least 90%, at least 91%, at least 92%, at least 93%, at least 94%, at least 95%, at least 96%, at least 97%, at least 98%, at least 99%, at least 99.5%, or 100% identical to SEQ ID NO: 729 and encodes a multidomain therapeutic protein (or a multidomain therapeutic protein comprising a sequence) at least 99%, at least 99.5%, or 100% identical to SEQ ID NO: 572. In another example, the nucleic acid construct comprises a sequence at least 90%, at least 91%, at least 92%, at least 93%, at least 94%, at least 95%, at least 96%, at least 97%, at least 98%, at least 99%, at least 99.5%, or 100% identical to SEQ ID NO: 729 and encodes a multidomain therapeutic protein comprising the sequence set forth in SEQ ID NO: 572. In another example, the nucleic acid construct comprises a sequence at least 95%, at least 96%, at least 97%, at least 98%, at least 99%, at least 99.5%, or 100% identical to SEQ ID NO: 729. In another example, the nucleic acid construct comprises a sequence at least 95%, at least 96%, at least 97%, at least 98%, at least 99%, at least 99.5%, or 100% identical to SEQ ID NO: 729 and encodes a multidomain therapeutic protein (or a multidomain therapeutic protein comprising a sequence) at least 99%, at least 99.5%, or 100% identical to SEQ ID NO: 572. In another example, the nucleic acid construct comprises a sequence at least 95%, at least 96%, at least 97%, at least 98%, at least 99%, at least 99.5%, or 100% identical to SEQ ID NO: 729 and encodes a multidomain therapeutic protein comprising the sequence set forth in SEQ ID NO: 572. In another example, the nucleic acid construct comprises a sequence at least 99%, at least 99.5%, or 100% identical to SEQ ID NO: 729. In another example, the nucleic acid construct comprises a sequence at least 99%, at least 99.5%, or 100% identical to SEQ ID NO: 729 and encodes a multidomain therapeutic protein (or a multidomain therapeutic protein comprising a sequence) at least 99%, at least 99.5%, or 100% identical to SEQ ID NO: 572. In another example, the nucleic acid construct comprises a sequence at least 99%, at least 99.5%, or 100% identical to SEQ ID NO: 729 and encodes a multidomain therapeutic protein comprising the sequence set forth in SEQ ID NO: 572. In another example, the nucleic acid construct comprises the sequence set forth in SEQ ID NO: 729. The multidomain therapeutic protein coding sequence can be, for example, CpG-depleted (e.g., fully CpG-depleted) and/or codon optimized. For example, the multidomain therapeutic protein coding sequence can be CpG depleted (e.g., fully CpG-depleted) and codon optimized. Optionally, the nucleic acid construct encodes a multidomain therapeutic protein (or a multidomain therapeutic protein comprising a sequence) at least 90%, at least 91%, at least 92%, at least 93%, at least 94%, at least 95%, at least 96%, at least 97%, at least 98%, at least 99%, at least 99.5%, or 100% identical to SEQ ID NO: 572 (and, e.g., retaining the activity of native GAA). Optionally, the nucleic acid construct encodes a multidomain therapeutic protein (or a multidomain therapeutic protein comprising a sequence) at least 95%, at least 96%, at least 97%, at least 98%, at least 99%, at least 99.5%, or 100% identical to SEQ ID NO: 572 (and, e.g., retaining the activity of native GAA). Optionally, the nucleic acid construct in the above examples encodes a multidomain therapeutic protein (or a multidomain therapeutic protein comprising a sequence) at least 99%, at least 99.5%, or 100% identical to SEQ ID NO: 572 (and, e.g., retaining the activity of native GAA). Optionally, the nucleic acid construct in the above examples encodes a multidomain therapeutic protein comprising the sequence set forth in SEQ ID NO: 572. Optionally, the nucleic acid construct in the above examples encodes a multidomain therapeutic protein consisting essentially of the sequence set forth in SEQ ID NO: 572. Optionally, the nucleic acid construct in the above examples encodes a multidomain therapeutic protein consisting of the sequence set forth in SEQ ID NO: 572.

[0452] In one example, the multidomain therapeutic protein coding sequence is (or comprises a sequence) at least 90%, at least 91%, at least 92%, at least 93%, at least 94%, at least 95%, at least 96%, at least 97%, at least 98%, at least 99%, at least 99.5%, or 100% identical to SEQ ID NO: 582. In another example, the multidomain therapeutic protein coding sequence is (or comprises a sequence) at least 90%, at least 91%, at least 92%, at least 93%, at least 94%, at least 95%, at least 96%, at least 97%, at least 98%, at least 99%, at least 99.5%, or 100% identical to SEQ ID NO: 582 and encodes a multidomain therapeutic protein (or a multidomain therapeutic protein comprising a sequence) at least 99%, at least 99.5%, or 100% identical to SEQ ID NO: 572. In another example, the multidomain therapeutic protein coding sequence is (or comprises a sequence) at least 90%, at least 91%, at least 92%, at least 93%, at least 94%, at least 95%, at least 96%, at least 97%, at least 98%, at least 99%, at least 99.5%, or 100% identical to SEQ ID NO: 582 and encodes a multidomain therapeutic protein comprising the sequence set forth in SEQ ID NO: 572. In another example, the multidomain therapeutic protein coding sequence is (or comprises a sequence) at least 95%, at least 96%, at least 97%, at least 98%, at least 99%, at least 99.5%, or 100% identical to SEQ ID NO: 582. In another example, the multidomain therapeutic protein coding sequence is (or comprises a sequence) at least 95%, at least 96%, at least 97%, at least 98%, at least 99%, at least 99.5%, or 100% identical to SEQ ID NO: 582 and encodes a multidomain therapeutic protein (or a multidomain therapeutic protein comprising a sequence) at least 99%, at least 99.5%, or 100% identical to SEQ ID NO: 572. In another example, the multidomain therapeutic protein coding sequence is (or comprises a sequence) at least 95%, at least 96%, at least 97%, at least 98%, at least 99%, at least 99.5%, or 100% identical to SEQ ID NO: 582 and encodes a multidomain therapeutic protein comprising the sequence set forth in SEQ ID NO: 572. In another example, the multidomain therapeutic protein coding sequence is (or comprises a sequence) at least 99%, at least 99.5%, or 100% identical to SEQ ID NO: 582. In another example, the multidomain therapeutic protein coding sequence is (or comprises a sequence) at least 99%, at least 99.5%, or 100% identical to SEQ ID NO: 582 and encodes a multidomain therapeutic protein (or a multidomain therapeutic protein comprising a sequence) at least 99%, at least 99.5%, or 100% identical to SEQ ID NO: 572. In another example, the multidomain therapeutic protein coding sequence is (or comprises a sequence) at least 99%, at least 99.5%, or 100% identical to SEQ ID NO: 582 and encodes a multidomain therapeutic protein comprising the sequence set forth in SEQ ID NO: 572. In another example, the multidomain therapeutic protein coding sequence comprises the sequence set forth in SEQ ID NO: 582. In another example, the multidomain therapeutic protein coding sequence consists essentially of the sequence set forth in SEQ ID NO: 582. In another example, the multidomain therapeutic protein coding sequence consists of the sequence set forth in SEQ ID NO: 582. The multidomain therapeutic protein coding sequence can be, for example, CpG-depleted (e.g., fully CpG-depleted) and/or codon optimized. For example, the multidomain therapeutic protein coding sequence can be CpG depleted (e.g., fully CpG-depleted) and codon optimized. Optionally, the multidomain therapeutic protein coding sequence encodes a multidomain therapeutic protein (or a multidomain therapeutic protein comprising a sequence) at least 90%, at least 91%, at least 92%, at least 93%, at least 94%, at least 95%, at least 96%, at least 97%, at least 98%, at least 99%, at least 99.5%, or 100% identical to SEQ ID NO: 572 (and, e.g., retaining the activity of native GAA). Optionally, the multidomain therapeutic protein coding sequence encodes a multidomain therapeutic protein (or a multidomain therapeutic protein comprising a sequence) at least 95%, at least 96%, at least 97%, at least 98%, at least 99%, at least 99.5%, or 100% identical to SEQ ID NO: 572 (and, e.g., retaining the activity of native GAA). Optionally, the multidomain therapeutic protein coding sequence in the above examples encodes a multidomain therapeutic protein (or a multidomain therapeutic protein comprising a sequence) at least 99%, at least 99.5%, or 100% identical to SEQ ID NO: 572 (and, e.g., retaining the activity of native GAA). Optionally, the multidomain therapeutic protein coding sequence in the above examples encodes a multidomain therapeutic protein comprising the sequence set forth in SEQ ID NO: 572. Optionally, the multidomain therapeutic protein coding sequence in the above examples encodes a multidomain therapeutic protein consisting essentially of the sequence set forth in SEQ ID NO: 572. Optionally, the multidomain therapeutic protein coding sequence in the above examples encodes a multidomain therapeutic protein consisting of the sequence set forth in SEQ ID NO: 572.

[0453] The nucleic acid construct can comprise, for example, (1) a 5′ ITR (e.g., such as the one set forth in SEQ ID NO: 160), (2) a splice acceptor site (e.g., a mouse Alb exon 2 splice acceptor, such as the one set forth in SEQ ID NO: 163), (3) the multidomain therapeutic protein coding sequence, (4) a polyadenylation signal (e.g., an SV40 polyadenylation signal, such as the one set forth in SEQ ID NO: 712), and (5) a 3′ ITR (e.g., such as the one set forth in SEQ ID NO: 160 or the reverse complement thereof). In one example, the nucleic acid construct comprises a sequence at least 90%, at least 91%, at least 92%, at least 93%, at least 94%, at least 95%, at least 96%, at least 97%, at least 98%, at least 99%, at least 99.5%, or 100% identical to SEQ ID NO: 730. In another example, the nucleic acid construct comprises a sequence at least 90%, at least 91%, at least 92%, at least 93%, at least 94%, at least 95%, at least 96%, at least 97%, at least 98%, at least 99%, at least 99.5%, or 100% identical to SEQ ID NO: 730 and encodes a multidomain therapeutic protein (or a multidomain therapeutic protein comprising a sequence) at least 99%, at least 99.5%, or 100% identical to SEQ ID NO: 572. In another example, the nucleic acid construct comprises a sequence at least 90%, at least 91%, at least 92%, at least 93%, at least 94%, at least 95%, at least 96%, at least 97%, at least 98%, at least 99%, at least 99.5%, or 100% identical to SEQ ID NO: 730 and encodes a multidomain therapeutic protein comprising the sequence set forth in SEQ ID NO: 572. In another example, the nucleic acid construct comprises a sequence at least 95%, at least 96%, at least 97%, at least 98%, at least 99%, at least 99.5%, or 100% identical to SEQ ID NO: 730. In another example, the nucleic acid construct comprises a sequence at least 95%, at least 96%, at least 97%, at least 98%, at least 99%, at least 99.5%, or 100% identical to SEQ ID NO: 730 and encodes a multidomain therapeutic protein (or a multidomain therapeutic protein comprising a sequence) at least 99%, at least 99.5%, or 100% identical to SEQ ID NO: 572. In another example, the nucleic acid construct comprises a sequence at least 95%, at least 96%, at least 97%, at least 98%, at least 99%, at least 99.5%, or 100% identical to SEQ ID NO: 730 and encodes a multidomain therapeutic protein comprising the sequence set forth in SEQ ID NO: 572. In another example, the nucleic acid construct comprises a sequence at least 99%, at least 99.5%, or 100% identical to SEQ ID NO: 730. In another example, the nucleic acid construct comprises a sequence at least 99%, at least 99.5%, or 100% identical to SEQ ID NO: 730 and encodes a multidomain therapeutic protein (or a multidomain therapeutic protein comprising a sequence) at least 99%, at least 99.5%, or 100% identical to SEQ ID NO: 572. In another example, the nucleic acid construct comprises a sequence at least 99%, at least 99.5%, or 100% identical to SEQ ID NO: 730 and encodes a multidomain therapeutic protein comprising the sequence set forth in SEQ ID NO: 572. In another example, the nucleic acid construct comprises the sequence set forth in SEQ ID NO: 730. The multidomain therapeutic protein coding sequence can be, for example, CpG-depleted (e.g., fully CpG-depleted) and/or codon optimized. For example, the multidomain therapeutic protein coding sequence can be CpG depleted (e.g., fully CpG-depleted) and codon optimized. Optionally, the nucleic acid construct encodes a multidomain therapeutic protein (or a multidomain therapeutic protein comprising a sequence) at least 90%, at least 91%, at least 92%, at least 93%, at least 94%, at least 95%, at least 96%, at least 97%, at least 98%, at least 99%, at least 99.5%, or 100% identical to SEQ ID NO: 572 (and, e.g., retaining the activity of native GAA). Optionally, the nucleic acid construct encodes a multidomain therapeutic protein (or a multidomain therapeutic protein comprising a sequence) at least 95%, at least 96%, at least 97%, at least 98%, at least 99%, at least 99.5%, or 100% identical to SEQ ID NO: 572 (and, e.g., retaining the activity of native GAA). Optionally, the nucleic acid construct in the above examples encodes a multidomain therapeutic protein (or a multidomain therapeutic protein comprising a sequence) at least 99%, at least 99.5%, or 100% identical to SEQ ID NO: 572 (and, e.g., retaining the activity of native GAA). Optionally, the nucleic acid construct in the above examples encodes a multidomain therapeutic protein comprising the sequence set forth in SEQ ID NO: 572. Optionally, the nucleic acid construct in the above examples encodes a multidomain therapeutic protein consisting essentially of the sequence set forth in SEQ ID NO: 572. Optionally, the nucleic acid construct in the above examples encodes a multidomain therapeutic protein consisting of the sequence set forth in SEQ ID NO: 572.

[0454] In one example, the multidomain therapeutic protein coding sequence is (or comprises a sequence) at least 90%, at least 91%, at least 92%, at least 93%, at least 94%, at least 95%, at least 96%, at least 97%, at least 98%, at least 99%, at least 99.5%, or 100% identical to SEQ ID NO: 583. In another example, the multidomain therapeutic protein coding sequence is (or comprises a sequence) at least 90%, at least 91%, at least 92%, at least 93%, at least 94%, at least 95%, at least 96%, at least 97%, at least 98%, at least 99%, at least 99.5%, or 100% identical to SEQ ID NO: 583 and encodes a multidomain therapeutic protein (or a multidomain therapeutic protein comprising a sequence) at least 99%, at least 99.5%, or 100% identical to SEQ ID NO: 572. In another example, the multidomain therapeutic protein coding sequence is (or comprises a sequence) at least 90%, at least 91%, at least 92%, at least 93%, at least 94%, at least 95%, at least 96%, at least 97%, at least 98%, at least 99%, at least 99.5%, or 100% identical to SEQ ID NO: 583 and encodes a multidomain therapeutic protein comprising the sequence set forth in SEQ ID NO: 572. In another example, the multidomain therapeutic protein coding sequence is (or comprises a sequence) at least 95%, at least 96%, at least 97%, at least 98%, at least 99%, at least 99.5%, or 100% identical to SEQ ID NO: 583. In another example, the multidomain therapeutic protein coding sequence is (or comprises a sequence) at least 95%, at least 96%, at least 97%, at least 98%, at least 99%, at least 99.5%, or 100% identical to SEQ ID NO: 583 and encodes a multidomain therapeutic protein (or a multidomain therapeutic protein comprising a sequence) at least 99%, at least 99.5%, or 100% identical to SEQ ID NO: 572. In another example, the multidomain therapeutic protein coding sequence is (or comprises a sequence) at least 95%, at least 96%, at least 97%, at least 98%, at least 99%, at least 99.5%, or 100% identical to SEQ ID NO: 583 and encodes a multidomain therapeutic protein comprising the sequence set forth in SEQ ID NO: 572. In another example, the multidomain therapeutic protein coding sequence is (or comprises a sequence) at least 99%, at least 99.5%, or 100% identical to SEQ ID NO: 583. In another example, the multidomain therapeutic protein coding sequence is (or comprises a sequence) at least 99%, at least 99.5%, or 100% identical to SEQ ID NO: 583 and encodes a multidomain therapeutic protein (or a multidomain therapeutic protein comprising a sequence) at least 99%, at least 99.5%, or 100% identical to SEQ ID NO: 572. In another example, the multidomain therapeutic protein coding sequence is (or comprises a sequence) at least 99%, at least 99.5%, or 100% identical to SEQ ID NO: 583 and encodes a multidomain therapeutic protein comprising the sequence set forth in SEQ ID NO: 572. In another example, the multidomain therapeutic protein coding sequence comprises the sequence set forth in SEQ ID NO: 583. In another example, the multidomain therapeutic protein coding sequence consists essentially of the sequence set forth in SEQ ID NO: 583. In another example, the multidomain therapeutic protein coding sequence consists of the sequence set forth in SEQ ID NO: 583. The multidomain therapeutic protein coding sequence can be, for example, CpG-depleted (e.g., fully CpG-depleted) and/or codon optimized. For example, the multidomain therapeutic protein coding sequence can be CpG depleted (e.g., fully CpG-depleted) and codon optimized. Optionally, the multidomain therapeutic protein coding sequence encodes a multidomain therapeutic protein (or a multidomain therapeutic protein comprising a sequence) at least 90%, at least 91%, at least 92%, at least 93%, at least 94%, at least 95%, at least 96%, at least 97%, at least 98%, at least 99%, at least 99.5%, or 100% identical to SEQ ID NO: 572 (and, e.g., retaining the activity of native GAA). Optionally, the multidomain therapeutic protein coding sequence encodes a multidomain therapeutic protein (or a multidomain therapeutic protein comprising a sequence) at least 95%, at least 96%, at least 97%, at least 98%, at least 99%, at least 99.5%, or 100% identical to SEQ ID NO: 572 (and, e.g., retaining the activity of native GAA). Optionally, the multidomain therapeutic protein coding sequence in the above examples encodes a multidomain therapeutic protein (or a multidomain therapeutic protein comprising a sequence) at least 99%, at least 99.5%, or 100% identical to SEQ ID NO: 572 (and, e.g., retaining the activity of native GAA). Optionally, the multidomain therapeutic protein coding sequence in the above examples encodes a multidomain therapeutic protein comprising the sequence set forth in SEQ ID NO: 572. Optionally, the multidomain therapeutic protein coding sequence in the above examples encodes a multidomain therapeutic protein consisting essentially of the sequence set forth in SEQ ID NO: 572. Optionally, the multidomain therapeutic protein coding sequence in the above examples encodes a multidomain therapeutic protein consisting of the sequence set forth in SEQ ID NO: 572.

[0455] The nucleic acid construct can comprise, for example, (1) a 5′ ITR (e.g., such as the one set forth in SEQ ID NO: 160), (2) a splice acceptor site (e.g., a mouse Alb exon 2 splice acceptor, such as the one set forth in SEQ ID NO: 163), (3) the multidomain therapeutic protein coding sequence, (4) a polyadenylation signal (e.g., an SV40 polyadenylation signal, such as the one set forth in SEQ ID NO: 712), and (5) a 3′ ITR (e.g., such as the one set forth in SEQ ID NO: 160 or the reverse complement thereof). In one example, the nucleic acid construct comprises a sequence at least 90%, at least 91%, at least 92%, at least 93%, at least 94%, at least 95%, at least 96%, at least 97%, at least 98%, at least 99%, at least 99.5%, or 100% identical to SEQ ID NO: 731. In another example, the nucleic acid construct comprises a sequence at least 90%, at least 91%, at least 92%, at least 93%, at least 94%, at least 95%, at least 96%, at least 97%, at least 98%, at least 99%, at least 99.5%, or 100% identical to SEQ ID NO: 731 and encodes a multidomain therapeutic protein (or a multidomain therapeutic protein comprising a sequence) at least 99%, at least 99.5%, or 100% identical to SEQ ID NO: 572. In another example, the nucleic acid construct comprises a sequence at least 90%, at least 91%, at least 92%, at least 93%, at least 94%, at least 95%, at least 96%, at least 97%, at least 98%, at least 99%, at least 99.5%, or 100% identical to SEQ ID NO: 731 and encodes a multidomain therapeutic protein comprising the sequence set forth in SEQ ID NO: 572. In another example, the nucleic acid construct comprises a sequence at least 95%, at least 96%, at least 97%, at least 98%, at least 99%, at least 99.5%, or 100% identical to SEQ ID NO: 731. In another example, the nucleic acid construct comprises a sequence at least 95%, at least 96%, at least 97%, at least 98%, at least 99%, at least 99.5%, or 100% identical to SEQ ID NO: 731 and encodes a multidomain therapeutic protein (or a multidomain therapeutic protein comprising a sequence) at least 99%, at least 99.5%, or 100% identical to SEQ ID NO: 572. In another example, the nucleic acid construct comprises a sequence at least 95%, at least 96%, at least 97%, at least 98%, at least 99%, at least 99.5%, or 100% identical to SEQ ID NO: 731 and encodes a multidomain therapeutic protein comprising the sequence set forth in SEQ ID NO: 572. In another example, the nucleic acid construct comprises a sequence at least 99%, at least 99.5%, or 100% identical to SEQ ID NO: 731. In another example, the nucleic acid construct comprises a sequence at least 99%, at least 99.5%, or 100% identical to SEQ ID NO: 731 and encodes a multidomain therapeutic protein (or a multidomain therapeutic protein comprising a sequence) at least 99%, at least 99.5%, or 100% identical to SEQ ID NO: 572. In another example, the nucleic acid construct comprises a sequence at least 99%, at least 99.5%, or 100% identical to SEQ ID NO: 731 and encodes a multidomain therapeutic protein comprising the sequence set forth in SEQ ID NO: 572. In another example, the nucleic acid construct comprises the sequence set forth in SEQ ID NO: 731. The multidomain therapeutic protein coding sequence can be, for example, CpG-depleted (e.g., fully CpG-depleted) and/or codon optimized. For example, the multidomain therapeutic protein coding sequence can be CpG depleted (e.g., fully CpG-depleted) and codon optimized. Optionally, the nucleic acid construct encodes a multidomain therapeutic protein (or a multidomain therapeutic protein comprising a sequence) at least 90%, at least 91%, at least 92%, at least 93%, at least 94%, at least 95%, at least 96%, at least 97%, at least 98%, at least 99%, at least 99.5%, or 100% identical to SEQ ID NO: 572 (and, e.g., retaining the activity of native GAA). Optionally, the nucleic acid construct encodes a multidomain therapeutic protein (or a multidomain therapeutic protein comprising a sequence) at least 95%, at least 96%, at least 97%, at least 98%, at least 99%, at least 99.5%, or 100% identical to SEQ ID NO: 572 (and, e.g., retaining the activity of native GAA). Optionally, the nucleic acid construct in the above examples encodes a multidomain therapeutic protein (or a multidomain therapeutic protein comprising a sequence) at least 99%, at least 99.5%, or 100% identical to SEQ ID NO: 572 (and, e.g., retaining the activity of native GAA). Optionally, the nucleic acid construct in the above examples encodes a multidomain therapeutic protein comprising the sequence set forth in SEQ ID NO: 572. Optionally, the nucleic acid construct in the above examples encodes a multidomain therapeutic protein consisting essentially of the sequence set forth in SEQ ID NO: 572. Optionally, the nucleic acid construct in the above examples encodes a multidomain therapeutic protein consisting of the sequence set forth in SEQ ID NO: 572.

[0456] Various multidomain therapeutic protein coding sequences are provided. In one example, the multidomain therapeutic protein coding sequence is (or comprises a sequence) at least 90%, at least 91%, at least 92%, at least 93%, at least 94%, at least 95%, at least 96%, at least 97%, at least 98%, at least 99%, at least 99.5%, or 100% identical to any one of SEQ ID NOS: 574 and 578-580. In another example, the multidomain therapeutic protein coding sequence is (or comprises a sequence) at least 95%, at least 96%, at least 97%, at least 98%, at least 99%, at least 99.5%, or 100% identical to any one of SEQ ID NOS: 574 and 578-580. In another example, the multidomain therapeutic protein coding sequence is (or comprises a sequence) at least 99%, at least 99.5%, or 100% identical to any one of SEQ ID NOS: 574 and 578-580. In another example, the multidomain therapeutic protein coding sequence comprises the sequence set forth in any one of SEQ ID NOS: 574 and 578-580. In another example, the multidomain therapeutic protein coding sequence consists essentially of the sequence set forth in any one of SEQ ID NOS: 574 and 578-580. In another example, the multidomain therapeutic protein coding sequence consists of the sequence set forth in any one of SEQ ID NOS: 574 and 578-580. Optionally, the multidomain therapeutic protein coding sequence encodes a multidomain therapeutic protein (or a multidomain therapeutic protein comprising a sequence) at least 90%, at least 91%, at least 92%, at least 93%, at least 94%, at least 95%, at least 96%, at least 97%, at least 98%, at least 99%, at least 99.5%, or 100% identical to SEQ ID NO: 570 (and, e.g., retaining the activity of native GAA). Optionally, the multidomain therapeutic protein coding sequence encodes a multidomain therapeutic protein (or a multidomain therapeutic protein comprising a sequence) at least 95%, at least 96%, at least 97%, at least 98%, at least 99%, at least 99.5%, or 100% identical to SEQ ID NO: 570 (and, e.g., retaining the activity of native GAA). Optionally, the multidomain therapeutic protein coding sequence in the above examples encodes a multidomain therapeutic protein (or a multidomain therapeutic protein comprising a sequence) at least 99%, at least 99.5%, or 100% identical to SEQ ID NO: 570 (and, e.g., retaining the activity of native GAA). Optionally, the multidomain therapeutic protein coding sequence in the above examples encodes a multidomain therapeutic protein comprising the sequence set forth in SEQ ID NO: 570. Optionally, the multidomain therapeutic protein coding sequence in the above examples encodes a multidomain therapeutic protein consisting essentially of the sequence set forth in SEQ ID NO: 570. Optionally, the multidomain therapeutic protein coding sequence in the above examples encodes a multidomain therapeutic protein consisting of the sequence set forth in SEQ ID NO: 570.

[0457] Various codon optimized multidomain therapeutic protein coding sequences are provided. The multidomain therapeutic protein coding sequence can be, for example, CpG-depleted (e.g., fully CpG depleted) and/or codon optimized (e.g., CpG depleted (e.g., fully CpG-depleted) and codon optimized). In one example, the multidomain therapeutic protein coding sequence is (or comprises a sequence) at least 90%, at least 91%, at least 92%, at least 93%, at least 94%, at least 95%, at least 96%, at least 97%, at least 98%, at least 99%, at least 99.5%, or 100% identical to any one of SEQ ID NOS: 578-580. In another example, the multidomain therapeutic protein coding sequence is (or comprises a sequence) at least 95%, at least 96%, at least 97%, at least 98%, at least 99%, at least 99.5%, or 100% identical to any one of SEQ ID NOS: 578-580. In another example, the multidomain therapeutic protein coding sequence is (or comprises a sequence) at least 99%, at least 99.5%, or 100% identical to any one of SEQ ID NOS: 578-580. In another example, the multidomain therapeutic protein coding sequence comprises the sequence set forth in any one of SEQ ID NOS: 578-580. In another example, the multidomain therapeutic protein coding sequence consists essentially of the sequence set forth in any one of SEQ ID NOS: 578-580. In another example, the multidomain therapeutic protein coding sequence consists of the sequence set forth in any one of SEQ ID NOS: 578-580. Optionally, the multidomain therapeutic protein coding sequence encodes a multidomain therapeutic protein (or a multidomain therapeutic protein comprising a sequence) at least 90%, at least 91%, at least 92%, at least 93%, at least 94%, at least 95%, at least 96%, at least 97%, at least 98%, at least 99%, at least 99.5%, or 100% identical to SEQ ID NO: 570 (and, e.g., retaining the activity of native GAA). Optionally, the multidomain therapeutic protein coding sequence encodes a multidomain therapeutic protein (or a multidomain therapeutic protein comprising a sequence) at least 95%, at least 96%, at least 97%, at least 98%, at least 99%, at least 99.5%, or 100% identical to SEQ ID NO: 570 (and, e.g., retaining the activity of native GAA). Optionally, the GAA coding sequence in the above examples encodes a multidomain therapeutic protein (or a multidomain therapeutic protein comprising a sequence) at least 99%, at least 99.5%, or 100% identical to SEQ ID NO: 570 (and, e.g., retaining the activity of native GAA). Optionally, the multidomain therapeutic protein coding sequence in the above examples encodes a multidomain therapeutic protein comprising the sequence set forth in SEQ ID NO: 570. Optionally, the multidomain therapeutic protein coding sequence in the above examples encodes a multidomain therapeutic protein consisting essentially of the sequence set forth in SEQ ID NO: 570. Optionally, the multidomain therapeutic protein coding sequence in the above examples encodes a multidomain therapeutic protein consisting of the sequence set forth in SEQ ID NO: 570.

[0458] In one example, the multidomain therapeutic protein coding sequence is (or comprises a sequence) at least 90%, at least 91%, at least 92%, at least 93%, at least 94%, at least 95%, at least 96%, at least 97%, at least 98%, at least 99%, at least 99.5%, or 100% identical to SEQ ID NO: 578. In another example, the multidomain therapeutic protein coding sequence is (or comprises a sequence) at least 90%, at least 91%, at least 92%, at least 93%, at least 94%, at least 95%, at least 96%, at least 97%, at least 98%, at least 99%, at least 99.5%, or 100% identical to SEQ ID NO: 578 and encodes a multidomain therapeutic protein (or a multidomain therapeutic protein comprising a sequence) at least 99%, at least 99.5%, or 100% identical to SEQ ID NO: 570. In another example, the multidomain therapeutic protein coding sequence is (or comprises a sequence) at least 90%, at least 91%, at least 92%, at least 93%, at least 94%, at least 95%, at least 96%, at least 97%, at least 98%, at least 99%, at least 99.5%, or 100% identical to SEQ ID NO: 578 and encodes a multidomain therapeutic protein comprising the sequence set forth in SEQ ID NO: 570. In another example, the multidomain therapeutic protein coding sequence is (or comprises a sequence) at least 95%, at least 96%, at least 97%, at least 98%, at least 99%, at least 99.5%, or 100% identical to SEQ ID NO: 578. In another example, the multidomain therapeutic protein coding sequence is (or comprises a sequence) at least 95%, at least 96%, at least 97%, at least 98%, at least 99%, at least 99.5%, or 100% identical to SEQ ID NO: 578 and encodes a multidomain therapeutic protein (or a multidomain therapeutic protein comprising a sequence) at least 99%, at least 99.5%, or 100% identical to SEQ ID NO: 570. In another example, the multidomain therapeutic protein coding sequence is (or comprises a sequence) at least 95%, at least 96%, at least 97%, at least 98%, at least 99%, at least 99.5%, or 100% identical to SEQ ID NO: 578 and encodes a multidomain therapeutic protein comprising the sequence set forth in SEQ ID NO: 570. In another example, the multidomain therapeutic protein coding sequence is (or comprises a sequence) at least 99%, at least 99.5%, or 100% identical to SEQ ID NO: 578. In another example, the multidomain therapeutic protein coding sequence is (or comprises a sequence) at least 99%, at least 99.5%, or 100% identical to SEQ ID NO: 578 and encodes a multidomain therapeutic protein (or a multidomain therapeutic protein comprising a sequence) at least 99%, at least 99.5%, or 100% identical to SEQ ID NO: 570. In another example, the multidomain therapeutic protein coding sequence is (or comprises a sequence) at least 99%, at least 99.5%, or 100% identical to SEQ ID NO: 578 and encodes a multidomain therapeutic protein comprising the sequence set forth in SEQ ID NO: 570. In another example, the multidomain therapeutic protein coding sequence comprises the sequence set forth in SEQ ID NO: 578. In another example, the multidomain therapeutic protein coding sequence consists essentially of the sequence set forth in SEQ ID NO: 578. In another example, the multidomain therapeutic protein coding sequence consists of the sequence set forth in SEQ ID NO: 578. The multidomain therapeutic protein coding sequence can be, for example, CpG-depleted (e.g., fully CpG-depleted) and/or codon optimized. For example, the multidomain therapeutic protein coding sequence can be CpG depleted (e.g., fully CpG-depleted) and codon optimized. Optionally, the multidomain therapeutic protein coding sequence encodes a multidomain therapeutic protein (or a multidomain therapeutic protein comprising a sequence) at least 90%, at least 91%, at least 92%, at least 93%, at least 94%, at least 95%, at least 96%, at least 97%, at least 98%, at least 99%, at least 99.5%, or 100% identical to SEQ ID NO: 570 (and, e.g., retaining the activity of native GAA). Optionally, the multidomain therapeutic protein coding sequence encodes a multidomain therapeutic protein (or a multidomain therapeutic protein comprising a sequence) at least 95%, at least 96%, at least 97%, at least 98%, at least 99%, at least 99.5%, or 100% identical to SEQ ID NO: 570 (and, e.g., retaining the activity of native GAA). Optionally, the multidomain therapeutic protein coding sequence in the above examples encodes a multidomain therapeutic protein (or a multidomain therapeutic protein comprising a sequence) at least 99%, at least 99.5%, or 100% identical to SEQ ID NO: 570 (and, e.g., retaining the activity of native GAA). Optionally, the multidomain therapeutic protein coding sequence in the above examples encodes a multidomain therapeutic protein comprising the sequence set forth in SEQ ID NO: 570. Optionally, the multidomain therapeutic protein coding sequence in the above examples encodes a multidomain therapeutic protein consisting essentially of the sequence set forth in SEQ ID NO: 570. Optionally, the multidomain therapeutic protein coding sequence in the above examples encodes a multidomain therapeutic protein consisting of the sequence set forth in SEQ ID NO: 570.

[0459] In one example, the multidomain therapeutic protein coding sequence is (or comprises a sequence) at least 90%, at least 91%, at least 92%, at least 93%, at least 94%, at least 95%, at least 96%, at least 97%, at least 98%, at least 99%, at least 99.5%, or 100% identical to SEQ ID NO: 579. In another example, the multidomain therapeutic protein coding sequence is (or comprises a sequence) at least 90%, at least 91%, at least 92%, at least 93%, at least 94%, at least 95%, at least 96%, at least 97%, at least 98%, at least 99%, at least 99.5%, or 100% identical to SEQ ID NO: 579 and encodes a multidomain therapeutic protein (or a multidomain therapeutic protein comprising a sequence) at least 99%, at least 99.5%, or 100% identical to SEQ ID NO: 570. In another example, the multidomain therapeutic protein coding sequence is (or comprises a sequence) at least 90%, at least 91%, at least 92%, at least 93%, at least 94%, at least 95%, at least 96%, at least 97%, at least 98%, at least 99%, at least 99.5%, or 100% identical to SEQ ID NO: 579 and encodes a multidomain therapeutic protein comprising the sequence set forth in SEQ ID NO: 570. In another example, the multidomain therapeutic protein coding sequence is (or comprises a sequence) at least 95%, at least 96%, at least 97%, at least 98%, at least 99%, at least 99.5%, or 100% identical to SEQ ID NO: 579. In another example, the multidomain therapeutic protein coding sequence is (or comprises a sequence) at least 95%, at least 96%, at least 97%, at least 98%, at least 99%, at least 99.5%, or 100% identical to SEQ ID NO: 579 and encodes a multidomain therapeutic protein (or a multidomain therapeutic protein comprising a sequence) at least 99%, at least 99.5%, or 100% identical to SEQ ID NO: 570. In another example, the multidomain therapeutic protein coding sequence is (or comprises a sequence) at least 95%, at least 96%, at least 97%, at least 98%, at least 99%, at least 99.5%, or 100% identical to SEQ ID NO: 579 and encodes a multidomain therapeutic protein comprising the sequence set forth in SEQ ID NO: 570. In another example, the multidomain therapeutic protein coding sequence is (or comprises a sequence) at least 99%, at least 99.5%, or 100% identical to SEQ ID NO: 579. In another example, the multidomain therapeutic protein coding sequence is (or comprises a sequence) at least 99%, at least 99.5%, or 100% identical to SEQ ID NO: 579 and encodes a multidomain therapeutic protein (or a multidomain therapeutic protein comprising a sequence) at least 99%, at least 99.5%, or 100% identical to SEQ ID NO: 570. In another example, the multidomain therapeutic protein coding sequence is (or comprises a sequence) at least 99%, at least 99.5%, or 100% identical to SEQ ID NO: 579 and encodes a multidomain therapeutic protein comprising the sequence set forth in SEQ ID NO: 570. In another example, the multidomain therapeutic protein coding sequence comprises the sequence set forth in SEQ ID NO: 579. In another example, the multidomain therapeutic protein coding sequence consists essentially of the sequence set forth in SEQ ID NO: 579. In another example, the multidomain therapeutic protein coding sequence consists of the sequence set forth in SEQ ID NO: 579. The multidomain therapeutic protein coding sequence can be, for example, CpG-depleted (e.g., fully CpG-depleted) and/or codon optimized. For example, the multidomain therapeutic protein coding sequence can be CpG depleted (e.g., fully CpG-depleted) and codon optimized. Optionally, the multidomain therapeutic protein coding sequence encodes a multidomain therapeutic protein (or a multidomain therapeutic protein comprising a sequence) at least 90%, at least 91%, at least 92%, at least 93%, at least 94%, at least 95%, at least 96%, at least 97%, at least 98%, at least 99%, at least 99.5%, or 100% identical to SEQ ID NO: 570 (and, e.g., retaining the activity of native GAA). Optionally, the multidomain therapeutic protein coding sequence encodes a multidomain therapeutic protein (or a multidomain therapeutic protein comprising a sequence) at least 95%, at least 96%, at least 97%, at least 98%, at least 99%, at least 99.5%, or 100% identical to SEQ ID NO: 570 (and, e.g., retaining the activity of native GAA). Optionally, the multidomain therapeutic protein coding sequence in the above examples encodes a multidomain therapeutic protein (or a multidomain therapeutic protein comprising a sequence) at least 99%, at least 99.5%, or 100% identical to SEQ ID NO: 570 (and, e.g., retaining the activity of native GAA). Optionally, the multidomain therapeutic protein coding sequence in the above examples encodes a multidomain therapeutic protein comprising the sequence set forth in SEQ ID NO: 570. Optionally, the multidomain therapeutic protein coding sequence in the above examples encodes a multidomain therapeutic protein consisting essentially of the sequence set forth in SEQ ID NO: 570. Optionally, the multidomain therapeutic protein coding sequence in the above examples encodes a multidomain therapeutic protein consisting of the sequence set forth in SEQ ID NO: 570.

[0460] In one example, the multidomain therapeutic protein coding sequence is (or comprises a sequence) at least 90%, at least 91%, at least 92%, at least 93%, at least 94%, at least 95%, at least 96%, at least 97%, at least 98%, at least 99%, at least 99.5%, or 100% identical to SEQ ID NO: 580. In another example, the multidomain therapeutic protein coding sequence is (or comprises a sequence) at least 90%, at least 91%, at least 92%, at least 93%, at least 94%, at least 95%, at least 96%, at least 97%, at least 98%, at least 99%, at least 99.5%, or 100% identical to SEQ ID NO: 580 and encodes a multidomain therapeutic protein (or a multidomain therapeutic protein comprising a sequence) at least 99%, at least 99.5%, or 100% identical to SEQ ID NO: 570. In another example, the multidomain therapeutic protein coding sequence is (or comprises a sequence) at least 90%, at least 91%, at least 92%, at least 93%, at least 94%, at least 95%, at least 96%, at least 97%, at least 98%, at least 99%, at least 99.5%, or 100% identical to SEQ ID NO: 580 and encodes a multidomain therapeutic protein comprising the sequence set forth in SEQ ID NO: 570. In another example, the multidomain therapeutic protein coding sequence is (or comprises a sequence) at least 95%, at least 96%, at least 97%, at least 98%, at least 99%, at least 99.5%, or 100% identical to SEQ ID NO: 580. In another example, the multidomain therapeutic protein coding sequence is (or comprises a sequence) at least 95%, at least 96%, at least 97%, at least 98%, at least 99%, at least 99.5%, or 100% identical to SEQ ID NO: 580 and encodes a multidomain therapeutic protein (or a multidomain therapeutic protein comprising a sequence) at least 99%, at least 99.5%, or 100% identical to SEQ ID NO: 570. In another example, the multidomain therapeutic protein coding sequence is (or comprises a sequence) at least 95%, at least 96%, at least 97%, at least 98%, at least 99%, at least 99.5%, or 100% identical to SEQ ID NO: 580 and encodes a multidomain therapeutic protein comprising the sequence set forth in SEQ ID NO: 570. In another example, the multidomain therapeutic protein coding sequence is (or comprises a sequence) at least 99%, at least 99.5%, or 100% identical to SEQ ID NO: 580. In another example, the multidomain therapeutic protein coding sequence is (or comprises a sequence) at least 99%, at least 99.5%, or 100% identical to SEQ ID NO: 580 and encodes a multidomain therapeutic protein (or a multidomain therapeutic protein comprising a sequence) at least 99%, at least 99.5%, or 100% identical to SEQ ID NO: 570. In another example, the multidomain therapeutic protein coding sequence is (or comprises a sequence) at least 99%, at least 99.5%, or 100% identical to SEQ ID NO: 580 and encodes a multidomain therapeutic protein comprising the sequence set forth in SEQ ID NO: 570. In another example, the multidomain therapeutic protein coding sequence comprises the sequence set forth in SEQ ID NO: 580. In another example, the multidomain therapeutic protein coding sequence consists essentially of the sequence set forth in SEQ ID NO: 580. In another example, the multidomain therapeutic protein coding sequence consists of the sequence set forth in SEQ ID NO: 580. The multidomain therapeutic protein coding sequence can be, for example, CpG-depleted (e.g., fully CpG-depleted) and/or codon optimized. For example, the multidomain therapeutic protein coding sequence can be CpG depleted (e.g., fully CpG-depleted) and codon optimized. Optionally, the multidomain therapeutic protein coding sequence encodes a multidomain therapeutic protein (or a multidomain therapeutic protein comprising a sequence) at least 90%, at least 91%, at least 92%, at least 93%, at least 94%, at least 95%, at least 96%, at least 97%, at least 98%, at least 99%, at least 99.5%, or 100% identical to SEQ ID NO: 570 (and, e.g., retaining the activity of native GAA). Optionally, the multidomain therapeutic protein coding sequence encodes a multidomain therapeutic protein (or a multidomain therapeutic protein comprising a sequence) at least 95%, at least 96%, at least 97%, at least 98%, at least 99%, at least 99.5%, or 100% identical to SEQ ID NO: 570 (and, e.g., retaining the activity of native GAA). Optionally, the multidomain therapeutic protein coding sequence in the above examples encodes a multidomain therapeutic protein (or a multidomain therapeutic protein comprising a sequence) at least 99%, at least 99.5%, or 100% identical to SEQ ID NO: 570 (and, e.g., retaining the activity of native GAA). Optionally, the multidomain therapeutic protein coding sequence in the above examples encodes a multidomain therapeutic protein comprising the sequence set forth in SEQ ID NO: 570. Optionally, the multidomain therapeutic protein coding sequence in the above examples encodes a multidomain therapeutic protein consisting essentially of the sequence set forth in SEQ ID NO: 570. Optionally, the multidomain therapeutic protein coding sequence in the above examples encodes a multidomain therapeutic protein consisting of the sequence set forth in SEQ ID NO: 570.

[0461] Various multidomain therapeutic protein coding sequences are provided. In one example, the multidomain therapeutic protein coding sequence is (or comprises a sequence) at least 90%, at least 91%, at least 92%, at least 93%, at least 94%, at least 95%, at least 96%, at least 97%, at least 98%, at least 99%, at least 99.5%, or 100% identical to SEQ ID NO: 575. In another example, the multidomain therapeutic protein coding sequence is (or comprises a sequence) at least 95%, at least 96%, at least 97%, at least 98%, at least 99%, at least 99.5%, or 100% identical to SEQ ID NO: 575. In another example, the multidomain therapeutic protein coding sequence is (or comprises a sequence) at least 99%, at least 99.5%, or 100% identical to SEQ ID NO: 575. In another example, the multidomain therapeutic protein coding sequence comprises the sequence set forth in SEQ ID NO: 575. In another example, the multidomain therapeutic protein coding sequence consists essentially of the sequence set forth in SEQ ID NO: 575. In another example, the multidomain therapeutic protein coding sequence consists of the sequence set forth in SEQ ID NO: 575. Optionally, the multidomain therapeutic protein coding sequence encodes a multidomain therapeutic protein (or a multidomain therapeutic protein comprising a sequence) at least 90%, at least 91%, at least 92%, at least 93%, at least 94%, at least 95%, at least 96%, at least 97%, at least 98%, at least 99%, at least 99.5%, or 100% identical to SEQ ID NO: 571 (and, e.g., retaining the activity of native GAA). Optionally, the multidomain therapeutic protein coding sequence encodes a multidomain therapeutic protein (or a multidomain therapeutic protein comprising a sequence) at least 95%, at least 96%, at least 97%, at least 98%, at least 99%, at least 99.5%, or 100% identical to SEQ ID NO: 571 (and, e.g., retaining the activity of native GAA). Optionally, the multidomain therapeutic protein coding sequence in the above examples encodes a multidomain therapeutic protein (or a multidomain therapeutic protein comprising a sequence) at least 99%, at least 99.5%, or 100% identical to SEQ ID NO: 571 (and, e.g., retaining the activity of native GAA). Optionally, the multidomain therapeutic protein coding sequence in the above examples encodes a multidomain therapeutic protein comprising the sequence set forth in SEQ ID NO: 571. Optionally, the multidomain therapeutic protein coding sequence in the above examples encodes a multidomain therapeutic protein consisting essentially of the sequence set forth in SEQ ID NO: 571. Optionally, the multidomain therapeutic protein coding sequence in the above examples encodes a multidomain therapeutic protein consisting of the sequence set forth in SEQ ID NO: 571.

[0462] When specific multidomain therapeutic protein nucleic acid constructs sequences are disclosed herein, they are meant to encompass the sequence disclosed or the reverse complement of the sequence. For example, if a multidomain therapeutic protein nucleic acid construct disclosed herein consists of the hypothetical sequence 5′-CTGGACCGA-3′, it is also meant to encompass the reverse complement of that sequence (5′-TCGGTCCAG-3′). Likewise, when construct elements are disclosed herein in a specific 5′ to 3′ order, they are also meant to encompass the reverse complement of the order of those elements. One reason for this is that, in many embodiments disclosed herein, the multidomain therapeutic protein nucleic acid constructs are part of a single-stranded recombinant AAV vector. Single-stranded AAV genomes are packaged as either sense (plus-stranded) or anti-sense (minus-stranded genomes), and single-stranded AAV genomes of + and - polarity are packaged with equal frequency into mature rAAV virions. See, e.g., LING et al. (2015) J. Mol. Genet. Med. 9(3):175, Zhou et al. (2008) Mol. Ther. 16(3):494-499, and Samulski et al. (1987) J. Virol. 61:3096-3101, each of which is herein incorporated by reference in its entirety for all purposes.

### Vectors

[0463] The nucleic acid constructs disclosed herein can be provided in a vector for expression or for integration into and expression from a target genomic locus. A vector can comprise additional sequences such as, for example, replication origins, promoters, and genes encoding antibiotic resistance. A vector can also comprise nuclease agent components as disclosed elsewhere herein. For example, a vector can comprise a nucleic acid construct encoding a polypeptide of interest (e.g., encoding a multidomain therapeutic protein), a CRISPR/Cas system (nucleic acids encoding Cas protein and gRNA), one or more components of a CRISPR/Cas system, or a combination thereof (e.g., a nucleic acid construct and a gRNA). In some cases, a vector comprising a nucleic acid construct encoding a polypeptide of interest (e.g., encoding a multidomain therapeutic protein) does not comprise any components of the nuclease agents described herein (e.g., does not comprise a nucleic acid encoding a Cas protein and does not comprise a nucleic acid encoding a gRNA). Some such vectors comprise homology arms corresponding to target sites in the target genomic locus. Other such vectors do not comprise any homology arms.

[0464] Some vectors may be circular. Alternatively, the vector may be linear. The vector can be packaged for delivered via a lipid nanoparticle, liposome, non-lipid nanoparticle, or viral capsid. Non-limiting exemplary vectors include plasmids, phagemids, cosmids, artificial chromosomes, minichromosomes, transposons, viral vectors, and expression vectors.

[0465] The vectors can be, for example, viral vectors such as adeno-associated virus (AAV) vectors. The AAV may be any suitable serotype and may be a single-stranded AAV (ssAAV) or a self-complementary AAV (scAAV). Other exemplary viruses/viral vectors include retroviruses, lentiviruses, adenoviruses, vaccinia viruses, poxviruses, and herpes simplex viruses. The viruses can infect dividing cells, non-dividing cells, or both dividing and non-dividing cells. The viruses can integrate into the host genome or alternatively do not integrate into the host genome. Such viruses can also be engineered to have reduced immunity. The viruses can be replication-competent or can be replication-defective (e.g., defective in one or more genes necessary for additional rounds of virion replication and/or packaging). Viruses can cause transient expression or longer-lasting expression. Viral vector may be genetically modified from their wild type counterparts. For example, the viral vector may comprise an insertion, deletion, or substitution of one or more nucleotides to facilitate cloning or such that one or more properties of the vector is changed. Such properties may include packaging capacity, transduction efficiency, immunogenicity, genome integration, replication, transcription, and translation. In some examples, a portion of the viral genome may be deleted such that the virus is capable of packaging exogenous sequences having a larger size. In some examples, the viral vector may have an enhanced transduction efficiency. In some examples, the immune response induced by the virus in a host may be reduced. In some examples, viral genes (such as integrase) that promote integration of the viral sequence into a host genome may be mutated such that the virus becomes non-integrating. In some examples, the viral vector may be replication defective. In some examples, the viral vector may comprise exogenous transcriptional or translational control sequences to drive expression of coding sequences on the vector. In some examples, the virus may be helper-dependent. For example, the virus may need one or more helper virus to supply viral components (such as viral proteins) required to amplify and package the vectors into viral particles. In such a case, one or more helper components, including one or more vectors encoding the viral components, may be introduced into a host cell or population of host cells along with the vector system described herein. In other examples, the virus may be helper-free. For example, the virus may be capable of amplifying and packaging the vectors without a helper virus. In some examples, the vector system described herein may also encode the viral components required for virus amplification and packaging.

[0466] Exemplary viral titers (e.g., AAV titers) include about 10¹² to about 10¹⁶ vg/mL. Other exemplary viral titers (e.g., AAV titers) include about 10¹² to about 10¹⁶ vg/kg of body weight.

[0467] Adeno-associated viruses (AAVs) are endemic in multiple species including human and non-human primates (NHPs). At least 12 natural serotypes and hundreds of natural variants have been isolated and characterized to date. See, e.g., Li et al. (2020) Nat. Rev. Genet. 21:255-272, herein incorporated by reference in its entirety for all purposes. AAV particles are naturally composed of a non-enveloped icosahedral protein capsid containing a single-stranded DNA (ssDNA) genome. The DNA genome is flanked by two inverted terminal repeats (ITRs) which serve as the viral origins of replication and packaging signals. The rep gene encodes four proteins required for viral replication and packaging whilst the cap gene encodes the three structural capsid subunits which dictate the AAV serotype, and the Assembly Activating Protein (AAP) which promotes virion assembly in some serotypes.

[0468] Recombinant AAV (rAAV) is currently one of the most commonly used viral vectors used in gene therapy to treat human diseases by delivering therapeutic transgenes to target cells in vivo. Indeed, rAAV vectors are composed of icosahedral capsids similar to natural AAVs, but rAAV virions do not encapsidate AAV protein-coding or AAV replicating sequences. These viral vectors are non-replicating. The only viral sequences required in rAAV vectors are the two ITRs, which are needed to guide genome replication and packaging during manufacturing of the rAAV vector. rAAV genomes are devoid of AAV rep and cap genes, rendering them non-replicating in vivo. rAAV vectors are produced by expressing rep and cap genes along with additional viral helper proteins in trans, in combination with the intended transgene cassette flanked by AAV ITRs.

[0469] In therapeutic rAAV genomes, a gene expression cassette is placed between ITR sequences. Typically, rAAV genome cassettes comprise of a promoter to drive expression of a therapeutic transgene, followed by polyadenylation sequence. The ITRs flanking a rAAV expression cassette are usually derived from AAV2, the first serotype to be isolated and converted into a recombinant viral vector. Since then, most rAAV production methods rely on AAV2 Rep-based packaging systems. See, e.g., Colella et al. (2017) Mol. Ther. Methods Clin. Dev. 8:87-104, herein incorporated by reference in its entirety for all purposes.

[0470] Some non-limiting examples of ITRs that can be used include ITRs comprising, consisting essentially of, or consisting of SEQ ID NO: 158, SEQ ID NO: 159, or SEQ ID NO: 160. Other examples of ITRs comprise one or more mutations compared to SEQ ID NO: 158, SEQ ID NO: 159, or SEQ ID NO: 160 and can be at least 90%, at least 91%, at least 92%, at least 93%, at least 94%, at least 95%, at least 96%, at least 97%, at least 98%, or at least 99% identical to SEQ ID NO: 158, SEQ ID NO: 159, or SEQ ID NO: 160. In some rAAV genomes disclosed herein, the nucleic acid construct is flanked on both sides by the same ITR (i.e., the ITR on the 5′ end, and the reverse complement of the ITR on the 3′ end, such as SEQ ID NO: 158 on the 5′ end and SEQ ID NO: 168 on the 3′ end, or SEQ ID NO: 159 on the 5′ end and SEQ ID NO: 710 on the 3′ end, or SEQ ID NO: 160 on the 5′ end and SEQ ID NO: 711 on the 3′ end). In one example, the ITR on each end can comprise, consist essentially of, or consist of SEQ ID NO: 158 (i.e., SEQ ID NO: 158 on the 5′ end, and the reverse complement on the 3′ end). In another example, the ITR on each end can comprise, consist essentially of, or consist of SEQ ID NO: 159 (i.e., SEQ ID NO: 159 on the 5′ end, and the reverse complement on the 3′ end). In one example, the ITR on at least one end comprises, consists essentially of, or consists of SEQ ID NO: 160. In one example, the ITR on the 5′ end comprises, consists essentially of, or consists of SEQ ID NO: 160. In one example, the ITR on the 3′ end comprises, consists essentially of, or consists of SEQ ID NO: 160. In one example, the ITR on each end can comprise, consist essentially of, or consist of SEQ ID NO: 160 (i.e., SEQ ID NO: 160 on the 5′ end, and the reverse complement on the 3′ end). In other rAAV genomes disclosed herein, the nucleic acid construct is flanked by different ITRs on each end. In one example, the ITR on one end comprises, consists essentially of, or consists of SEQ ID NO: 158, and the ITR on the other end comprises, consists essentially of, or consists of SEQ ID NO: 159. In another example, the ITR on one end comprises, consists essentially of, or consists of SEQ ID NO: 158, and the ITR on the other end comprises, consists essentially of, or consists of SEQ ID NO: 160. In one example, the ITR on one end comprises, consists essentially of, or consists of SEQ ID NO: 159, and the ITR on the other end comprises, consists essentially of, or consists of SEQ ID NO: 160.

[0471] The specific serotype of a recombinant AAV vector influences its in vivo tropism to specific tissues. AAV capsid proteins are responsible for mediating attachment and entry into target cells, followed by endosomal escape and trafficking to the nucleus. Thus, the choice of serotype when developing a rAAV vector will influence what cell types and tissues the vector is most likely to bind to and transduce when injected in vivo. Several serotypes of rAAVs, including rAAV8, are capable of transducing the liver when delivered systemically in mice, NHPs and humans. See, e.g., Li et al. (2020) Nat. Rev. Genet. 21:255-272, herein incorporated by reference in its entirety for all purposes.

[0472] Once in the nucleus, the ssDNA genome is released from the virion and a complementary DNA strand is synthesized to generate a double-stranded DNA (dsDNA) molecule. Double-stranded AAV genomes naturally circularize via their ITRs and become episomes which will persist extrachromosomally in the nucleus. Therefore, for episomal gene therapy programs, rAAV-delivered rAAV episomes provide long-term, promoter-driven gene expression in non-dividing cells. However, this rAAV-delivered episomal DNA is diluted out as cells divide. In contrast, the gene therapy described herein is based on gene insertion to allow long-term gene expression.

[0473] When specific rAAVs comprising specific sequences (e.g., specific bidirectional construct sequences or specific unidirectional construct sequences) are disclosed herein, they are meant to encompass the sequence disclosed or the reverse complement of the sequence. For example, if a bidirectional or unidirectional construct disclosed herein consists of the hypothetical sequence 5′-CTGGACCGA-3′, it is also meant to encompass the reverse complement of that sequence (5′-TCGGTCCAG-3′). Likewise, when rAAVs comprising bidirectional or unidirectional construct elements in a specific 5′ to 3′ order are disclosed herein, they are also meant to encompass the reverse complement of the order of those elements. For example, if an rAAV is disclosed herein that comprises a bidirectional construct that comprises from 5′ to 3′ a first splice acceptor, a first coding sequence, a first terminator, a reverse complement of a second terminator, a reverse complement of a second coding sequence, and a reverse complement of a second splice acceptor, it is also meant to encompass a construct comprising from 5′ to 3′ the second splice acceptor, the second coding sequence, the second terminator, a reverse complement of the first terminator, a reverse complement of the first coding sequence, and a reverse complement of the first splice acceptor. Single-stranded AAV genomes are packaged as either sense (plus-stranded) or anti-sense (minus-stranded genomes), and single-stranded AAV genomes of + and - polarity are packaged with equal frequency into mature rAAV virions. See, e.g., LING et al. (2015) J. Mol. Genet. Med. 9(3):175, Zhou et al. (2008) Mol. Ther. 16(3):494-499, and Samulski et al. (1987) J. Virol. 61:3096-3101, each of which is herein incorporated by reference in its entirety for all purposes.

[0474] The ssDNA AAV genome consists of two open reading frames, Rep and Cap, flanked by two inverted terminal repeats that allow for synthesis of the complementary DNA strand. When constructing an AAV transfer plasmid, the transgene is placed between the two ITRs, and Rep and Cap can be supplied in trans. In addition to Rep and Cap, AAV can require a helper plasmid containing genes from adenovirus. These genes (E4, E2a, and VA) mediate AAV replication. For example, the transfer plasmid, Rep/Cap, and the helper plasmid can be transfected into HEK293 cells containing the adenovirus gene E1+ to produce infectious AAV particles. Alternatively, the Rep, Cap, and adenovirus helper genes may be combined into a single plasmid. Similar packaging cells and methods can be used for other viruses, such as retroviruses.

[0475] Multiple serotypes of AAV have been identified. These serotypes differ in the types of cells they infect (i.e., their tropism), allowing preferential transduction of specific cell types. The term AAV includes, for example, AAV1, AAV2, AAV3, AAV3B, AAV4, AAV5, AAV6, AAV6.2, AAV7, AAVrh.64R1, AAVhu.37, AAVrh.8, AAVrh.32.33, AAV8, AAV9, AAV-DJ, AAV2/8, AAVrh10, AAVLK03, AV10, AAV11, AAV12, rh10, and hybrids thereof, avian AAV, bovine AAV, canine AAV, equine AAV, primate AAV, non-primate AAV, and ovine AAV. The genomic sequences of various serotypes of AAV, as well as the sequences of the native terminal repeats (TRs), Rep proteins, and capsid subunits are known in the art. Such sequences may be found in the literature or in public databases such as GenBank. An “AAV vector” as used herein refers to an AAV vector comprising a heterologous sequence not of AAV origin (i.e., a nucleic acid sequence heterologous to AAV), typically comprising a sequence encoding an exogenous polypeptide of interest. The construct may comprise an AAV1, AAV2, AAV3, AAV3B, AAV4, AAV5, AAV6, AAV6.2, AAV7, AAVrh.64R1, AAVhu.37, AAVrh.8, AAVrh.32.33, AAV8, AAV9, AAV-DJ, AAV2/8, AAVrh10, AAVLK03, AV10, AAV11, AAV12, rh10, and hybrids thereof, avian AAV, bovine AAV, canine AAV, equine AAV, primate AAV, non-primate AAV, and ovine AAV capsid sequence. In general, the heterologous nucleic acid sequence (the transgene) is flanked by at least one, and generally by two, AAV inverted terminal repeat sequences (ITRs). An AAV vector may either be single-stranded (ssAAV) or self-complementary (scAAV). Examples of serotypes for liver tissue include AAV3B, AAV5, AAV6, AAV7, AAV8, AAV9, AAVrh.74, and AAVhu.37, and particularly AAV8. In a specific example, the AAV vector comprising the nucleic acid construct can be recombinant AAV8 (rAAV8). A rAAV8 vector as described herein is one in which the capsid is from AAV8. For example, an AAV vector using ITRs from AAV2 and a capsid of AAV8 is considered herein to be a rAAV8 vector.

[0476] Tropism can be further refined through pseudotyping, which is the mixing of a capsid and a genome from different viral serotypes. For example AAV⅖ indicates a virus containing the genome of serotype 2 packaged in the capsid from serotype 5. Use of pseudotyped viruses can improve transduction efficiency, as well as alter tropism. Hybrid capsids derived from different serotypes can also be used to alter viral tropism. For example, AAV-DJ contains a hybrid capsid from eight serotypes and displays high infectivity across a broad range of cell types in vivo. AAV-DJ8 is another example that displays the properties of AAV-DJ but with enhanced brain uptake. AAV serotypes can also be modified through mutations. Examples of mutational modifications of AAV2 include Y444F, Y500F, Y730F, and S662V. Examples of mutational modifications of AAV3 include Y705F, Y731F, and T492V. Examples of mutational modifications of AAV6 include S663V and T492V. Other pseudotyped/modified AAV variants include AAV2/1, AAV2/6, AAV2/7, AAV2/8, AAV2/9, AAV2.5, AAV8.2, and AAV/SASTG.

[0477] To accelerate transgene expression, self-complementary AAV (scAAV) variants can be used. Because AAV depends on the cell’s DNA replication machinery to synthesize the complementary strand of the AAV’s single-stranded DNA genome, transgene expression may be delayed. To address this delay, scAAV containing complementary sequences that are capable of spontaneously annealing upon infection can be used, eliminating the requirement for host cell DNA synthesis. However, single-stranded AAV (ssAAV) vectors can also be used.

[0478] To increase packaging capacity, longer transgenes may be split between two AAV transfer plasmids, the first with a 3′ splice donor and the second with a 5′ splice acceptor. Upon co-infection of a cell, these viruses form concatemers, are spliced together, and the full-length transgene can be expressed. Although this allows for longer transgene expression, expression is less efficient. Similar methods for increasing capacity utilize homologous recombination. For example, a transgene can be divided between two transfer plasmids but with substantial sequence overlap such that co-expression induces homologous recombination and expression of the full-length transgene.

### B. Nuclease Agents and CRISPR/Cas Systems

[0479] The methods and compositions disclosed herein can utilize nuclease agents such as Clustered Regularly Interspersed Short Palindromic Repeats (CRISPR)/CRISPR-associated (Cas) systems, zinc finger nuclease (ZFN) systems, or Transcription Activator-Like Effector Nuclease (TALEN) systems or components of such systems to modify a target genomic locus in a target gene such as a safe harbor gene (e.g., ALB) for insertion of a nucleic acid construct as disclosed herein. Generally, the nuclease agents involve the use of engineered cleavage systems to induce a double strand break or a nick (i.e., a single strand break) in a nuclease target site. Cleavage or nicking can occur through the use of specific nucleases such as engineered ZFNs, TALENs, or CRISPR/Cas systems with an engineered guide RNA to guide specific cleavage or nicking of the nuclease target site. Any nuclease agent that induces a nick or double-strand break at a desired target sequence can be used in the methods and compositions disclosed herein. The nuclease agent can be used to create a site of insertion at a desired locus (target gene) within a host genome, at which site the nucleic acid construct is inserted to express the polypeptide of interest (e.g., multidomain therapeutic protein). The polypeptide of interest (e.g., multidomain therapeutic protein) may be exogenous with respect to its insertion site or locus (target gene), such as a safe harbor locus from which polypeptide of interest is not normally expressed. Alternatively, the polypeptide of interest may be non- exogenous with respect to its insertion site, such as insertion into an endogenous locus encoding the polypeptide of interest to correct a defective gene encoding the polypeptide of interest.

[0480] In one example, the nuclease agent is a CRISPR/Cas system. In another example, the nuclease agent comprises one or more ZFNs. In yet another example, the nuclease agent comprises one or more TALENs. In a specific example, the CRISPR/Cas systems or components of such systems target an ALB gene or locus (e.g., ALB genomic locus) within a cell, or intron 1 of an ALB gene or locus within a cell. In a more specific example, the CRISPR/Cas systems or components of such systems target a human ALB gene or locus or intron 1 of a human ALB gene or locus within a cell.

[0481] CRISPR/Cas systems include transcripts and other elements involved in the expression of, or directing the activity of, Cas genes. A CRISPR/Cas system can be, for example, a type I, a type II, a type III system, or a type V system (e.g., subtype V-A or subtype V-B). The methods and compositions disclosed herein can employ CRISPR/Cas systems by utilizing CRISPR complexes (comprising a guide RNA (gRNA) complexed with a Cas protein) for site-directed binding or cleavage of nucleic acids. A CRISPR/Cas system targeting an ALB gene or locus comprises a Cas protein (or a nucleic acid encoding the Cas protein) and one or more guide RNAs (or DNAs encoding the one or more guide RNAs), with each of the one or more guide RNAs targeting a different guide RNA target sequence in the target genomic locus (e.g., ALB gene or locus).

[0482] CRISPR/Cas systems used in the compositions and methods disclosed herein can be non-naturally occurring. A non-naturally occurring system includes anything indicating the involvement of the hand of man, such as one or more components of the system being altered or mutated from their naturally occurring state, being at least substantially free from at least one other component with which they are naturally associated in nature, or being associated with at least one other component with which they are not naturally associated. For example, some CRISPR/Cas systems employ non-naturally occurring CRISPR complexes comprising a gRNA and a Cas protein that do not naturally occur together, employ a Cas protein that does not occur naturally, or employ a gRNA that does not occur naturally.

### Target Genomic Loci and Albumin (ALB)

[0483] Any target genomic locus capable of expressing a gene can be used, such as a safe harbor locus (safe harbor gene, such as ALB) or an endogenous GAA locus. The nucleic acid construct can be integrated into any part of the target genomic locus. For example, the nucleic acid construct can be inserted into an intron or an exon of a target genomic locus or can replace one or more introns and/or exons of a target genomic locus. In a specific example, the nucleic acid construct can be integrated into an intron of the target genomic locus, such as the first intron of the target genomic locus (e.g., ALB intron 1). See, e.g., WO 2020/082042, US 2020/0270617, WO 2020/082041, US 2020/0268906, WO 2020/082046, and US 2020/0289628, each of which is herein incorporated by reference in its entirety for all purposes. Constructs integrated into a target genomic locus can be operably linked to an endogenous promoter at the target genomic locus (e.g., the endogenous ALB promoter).

[0484] Interactions between integrated exogenous DNA and a host genome can limit the reliability and safety of integration and can lead to overt phenotypic effects that are not due to the targeted genetic modification but are instead due to unintended effects of the integration on surrounding endogenous genes. For example, randomly inserted transgenes can be subject to position effects and silencing, making their expression unreliable and unpredictable. Likewise, integration of exogenous DNA into a chromosomal locus can affect surrounding endogenous genes and chromatin, thereby altering cell behavior and phenotypes. Safe harbor loci include chromosomal loci where transgenes or other exogenous nucleic acid inserts can be stably and reliably expressed in all tissues of interest without overtly altering cell behavior or phenotype (i.e., without any deleterious effects on the host cell). See, e.g., Sadelain et al. (2012) Nat. Rev. Cancer 12:51-58, herein incorporated by reference in its entirety for all purposes. For example, the safe harbor locus can be one in which expression of the inserted gene sequence is not perturbed by any read-through expression from neighboring genes. For example, safe harbor loci can include chromosomal loci where exogenous DNA can integrate and function in a predictable manner without adversely affecting endogenous gene structure or expression. Safe harbor loci can include extragenic regions or intragenic regions such as, for example, loci within genes that are non-essential, dispensable, or able to be disrupted without overt phenotypic consequences.

[0485] Such safe harbor loci can offer an open chromatin configuration in all tissues and can be ubiquitously expressed during embryonic development and in adults. See, e.g., Zambrowicz et al. (1997) Proc. Natl. Acad. Sci. U.S.A. 94:3789-3794, herein incorporated by reference in its entirety for all purposes. In addition, the safe harbor loci can be targeted with high efficiency, and safe harbor loci can be disrupted with no overt phenotype. Examples of safe harbor loci include ALB, CCR5, HPRT, AAVS1, and Rosa26. See, e.g., U.S. Pat. Nos. 7,888,121; 7,972,854; 7,914,796; 7,951,925; 8,110,379; 8,409,861; 8,586,526; and U.S. Pat. Publication Nos. 2003/0232410; 2005/0208489; 2005/0026157; 2006/0063231; 2008/0159996; 2010/00218264; 2012/0017290; 2011/0265198; 2013/0137104; 2013/0122591; 2013/0177983; 2013/0177960; and 2013/0122591, each of which is herein incorporated by reference in its entirety for all purposes. Other examples of target genomic loci include an ALB locus, a EESYR locus, a SARS locus, position 188,083,272 of human chromosome 1 or its non-human mammalian orthologue, position 3,046,320 of human chromosome 10 or its non-human mammalian orthologue, position 67, 328,980 of human chromosome 17 or its non-human mammalian orthologue, an adeno-associated virus site 1 (AAVS 1) on chromosome, a naturally occurring site of integration of AAV virus on human chromosome 19 or its non-human mammalian orthologue, a chemokine receptor 5 (CCR5) gene, a chemokine receptor gene encoding an HIV-1 coreceptor, or a mouse Rosa26 locus or its non-murine mammalian orthologue.

[0486] In a specific example, a safe harbor locus is a locus within the genome wherein a gene may be inserted without significant deleterious effects on the host cell such as a hepatocyte (e.g., without causing apoptosis, necrosis, and/or senescence, or without causing more than 5%, 10%, 15%, 20%, 25%, 30%, or 40% apoptosis, necrosis, and/or senescence as compared to a control population of cells). The safe harbor locus can allow overexpression of an exogenous gene without significant deleterious effects on the host cell such as a hepatocyte (e.g., without causing apoptosis, necrosis, and/or senescence, or without causing more than 5%, 10%, 15%, 20%, 25%, 30%, or 40% apoptosis, necrosis, and/or senescence as compared to a control population of cells). A desirable safe harbor locus may be one in which expression of the inserted gene sequence is not perturbed by read-through expression from neighboring genes. The safe harbor may be a human safe harbor (e.g., for a liver tissue or hepatocyte host cell).

[0487] In a specific example, the target genomic locus is an ALB locus, such as intron 1 of an ALB locus. In a more specific example, the target genomic locus is a human ALB locus, such as intron 1 of a human ALB locus (e.g., SEQ ID NO: 4).

### Cas Proteins

[0488] Cas proteins generally comprise at least one RNA recognition or binding domain that can interact with guide RNAs. Cas proteins can also comprise nuclease domains (e.g., DNase domains or RNase domains), DNA-binding domains, helicase domains, protein-protein interaction domains, dimerization domains, and other domains. Some such domains (e.g., DNase domains) can be from a native Cas protein. Other such domains can be added to make a modified Cas protein. A nuclease domain possesses catalytic activity for nucleic acid cleavage, which includes the breakage of the covalent bonds of a nucleic acid molecule. Cleavage can produce blunt ends or staggered ends, and it can be single-stranded or double-stranded. For example, a wild type Cas9 protein will typically create a blunt cleavage product. Alternatively, a wild type Cpf1 protein (e.g., FnCpf1) can result in a cleavage product with a 5-nucleotide 5′ overhang, with the cleavage occurring after the 18th base pair from the PAM sequence on the non-targeted strand and after the 23rd base on the targeted strand. A Cas protein can have full cleavage activity to create a double-strand break at a target genomic locus (e.g., a double-strand break with blunt ends), or it can be a nickase that creates a single-strand break at a target genomic locus.

[0489] Examples of Cas proteins include Cas1, Cas1B, Cas2, Cas3, Cas4, Cas5, Cas5e (CasD), Cas6, Cas6e, Cas6f, Cas7, Cas8a1, Cas8a2, Cas8b, Cas8c, Cas9 (Csn1 or Csx12), Cas10, Cas10d, CasF, CasG, CasH, Csy1, Csy2, Csy3, Cse1 (CasA), Cse2 (CasB), Cse3 (CasE), Cse4 (CasC), Csc1, Csc2, Csa5, Csn2, Csm2, Csm3, Csm4, Csm5, Csm6, Cmr1, Cmr3, Cmr4, Cmr5, Cmr6, Csb1, Csb2, Csb3, Csx17, Csx14, Csx10, Csx16, CsaX, Csx3, Csx1, Csx15, Csf1, Csf2, Csf3, Csf4, and Cu1966, and homologs or modified versions thereof.

[0490] An exemplary Cas protein is a Cas9 protein or a protein derived from a Cas9 protein. Cas9 proteins are from a type II CRISPR/Cas system and typically share four key motifs with a conserved architecture. Motifs 1, 2, and 4 are RuvC-like motifs, and motif 3 is an HNH motif. Exemplary Cas9 proteins are from Streptococcus pyogenes, Streptococcus thermophilus, Streptococcus sp., Staphylococcus aureus, Nocardiopsis dassonvillei, Streptomyces pristinaespiralis, Streptomyces viridochromogenes, Streptomyces viridochromogenes, Streptosporangium roseum, Streptosporangium roseum, Alicyclobacillus acidocaldarius, Bacillus pseudomycoides, Bacillus selenitireducens, Exiguobacterium sibiricum, Lactobacillus delbrueckii, Lactobacillus salivarius, Microscilla marina, Burkholderiales bacterium, Polaromonas naphthalenivorans, Polaromonas sp., Crocosphaera watsonii, Cyanothece sp., Microcystis aeruginosa, Synechococcus sp., Acetohalobium arabaticum, Ammonifex degensii, Caldicelulosiruptor becscii, Candidatus Desulforudis, Clostridium botulinum, Clostridium difficile, Finegoldia magna, Natranaerobius thermophilus, Pelotomaculum thermopropionicum, Acidithiobacillus caldus, Acidithiobacillus ferrooxidans, Allochromatium vinosum, Marinobacter sp., Nitrosococcus halophilus, Nitrosococcus watsoni, Pseudoalteromonas haloplanktis, Ktedonobacter racemifer, Methanohalobium evestigatum, Anabaena variabilis, Nodularia spumigena, Nostoc sp., Arthrospira maxima, Arthrospira platensis, Arthrospira sp., Lyngbya sp., Microcoleus chthonoplastes, Oscillatoria sp., Petrotoga mobilis, Thermosipho africanus, Acaryochloris marina, Neisseria meningitidis, or Campylobacter jejuni. Additional examples of the Cas9 family members are described in WO 2014/131833, herein incorporated by reference in its entirety for all purposes. Cas9 from S. pyogenes (SpCas9) (e.g., assigned UniProt accession number Q99ZW2) is an exemplary Cas9 protein. An exemplary SpCas9 protein sequence is set forth in SEQ ID NO: 8 (encoded by the DNA sequence set forth in SEQ ID NO: 9). An exemplary SpCas9 mRNA (cDNA) sequence is set forth in SEQ ID NO: 10. Smaller Cas9 proteins (e.g., Cas9 proteins whose coding sequences are compatible with the maximum AAV packaging capacity when combined with a guide RNA coding sequence and regulatory elements for the Cas9 and guide RNA, such as SaCas9 and CjCas9 and Nme2Cas9) are other exemplary Cas9 proteins. For example, Cas9 from S. aureus (SaCas9) (e.g., assigned UniProt accession number J7RUA5) is another exemplary Cas9 protein. Likewise, Cas9 from Campylobacter jejuni (CjCas9) (e.g., assigned UniProt accession number Q0P897) is another exemplary Cas9 protein. See, e.g., Kim et al. (2017) Nat. Commun. 8:14500, herein incorporated by reference in its entirety for all purposes. SaCas9 is smaller than SpCas9, and CjCas9 is smaller than both SaCas9 and SpCas9. Cas9 from Neisseria meningitidis (Nme2Cas9) is another exemplary Cas9 protein. See, e.g., Edraki et al. (2019) Mol. Cell 73(4):714-726, herein incorporated by reference in its entirety for all purposes. Cas9 proteins from Streptococcus thermophilus (e.g., Streptococcus thermophilus LMD-9 Cas9 encoded by the CRISPR1 locus (St1Cas9) or Streptococcus thermophilus Cas9 from the CRISPR3 locus (St3Cas9)) are other exemplary Cas9 proteins. Cas9 from Francisella novicida (FnCas9) or the RHA Francisella novicida Cas9 variant that recognizes an alternative PAM (E1369R/E1449H/R1556A substitutions) are other exemplary Cas9 proteins. These and other exemplary Cas9 proteins are reviewed, e.g., in Cebrian-Serrano and Davies (2017) Mamm. Genome 28(7):247-261, herein incorporated by reference in its entirety for all purposes. Examples of Cas9 coding sequences, Cas9 mRNAs, and Cas9 protein sequences are provided in WO 2013/176772, WO 2014/065596, WO 2016/106121, WO 2019/067910, WO 2020/082042, US 2020/0270617, WO 2020/082041, US 2020/0268906, WO 2020/082046, and US 2020/0289628, each of which is herein incorporated by reference in its entirety for all purposes. Specific examples of ORFs and Cas9 amino acid sequences are provided in Table 30 at paragraph [0449] WO 2019/067910, and specific examples of Cas9 mRNAs and ORFs are provided in paragraphs [0214]-[0234] of WO 2019/067910. See also WO 2020/082046 A2 (pp. 84-85) and Table 24 in WO 2020/069296, each of which is herein incorporated by reference in its entirety for all purposes. An exemplary SpCas9 protein sequence comprises, consists essentially of, or consists of SEQ ID NO: 11. An exemplary SpCas9 mRNA sequence encoding that SpCas9 protein sequence comprises, consists essentially of, or consists of SEQ ID NO: 12. Another exemplary SpCas9 mRNA sequence encoding that SpCas9 protein sequence comprises, consists essentially of, or consists of SEQ ID NO: 1. Another exemplary SpCas9 mRNA sequence encoding that SpCas9 protein sequence comprises SEQ ID NO: 2. An exemplary SpCas9 coding sequence comprises, consists essentially of, or consists of SEQ ID NO: 3.

[0491] Another example of a Cas protein is a Cpfl (CRISPR from Prevotella and Francisella 1) protein. Cpfl is a large protein (about 1300 amino acids) that contains a RuvC-like nuclease domain homologous to the corresponding domain of Cas9 along with a counterpart to the characteristic arginine-rich cluster of Cas9. However, Cpf1 lacks the HNH nuclease domain that is present in Cas9 proteins, and the RuvC-like domain is contiguous in the Cpfl sequence, in contrast to Cas9 where it contains long inserts including the HNH domain. See, e.g., Zetsche et al. (2015) Cell 163(3):759-771, herein incorporated by reference in its entirety for all purposes. Exemplary Cpf1 proteins are from Francisella tularensis 1, Francisella tularensis subsp. novicida, Prevotella albensis, Lachnospiraceae bacterium MC2017 1, Butyrivibrio proteoclasticus, Peregrinibacteria bacterium GW2011_GWA2_33_10, Parcubacteria bacterium GW2011_GWC2_44_17, Smithella sp. SCADC, Acidaminococcus sp. BV3L6, Lachnospiraceae bacterium MA2020, Candidatus Methanoplasma termitum, Eubacterium eligens, Moraxella bovoculi 237, Leptospira inadai, Lachnospiraceae bacterium ND2006, Porphyromonas crevioricanis 3, Prevotella disiens, and Porphyromonas macacae. Cpfl from Francisella novicida U112 (FnCpf1; assigned UniProt accession number A0Q7Q2) is an exemplary Cpfl protein.

[0492] Another example of a Cas protein is CasX (Cas12e). CasX is an RNA-guided DNA endonuclease that generates a staggered double-strand break in DNA. CasX is less than 1000 amino acids in size. Exemplary CasX proteins are from Deltaproteobacteria (DpbCasX or DpbCas12e) and Planctomycetes (PlmCasX or PlmCas12e). Like Cpf1, CasX uses a single RuvC active site for DNA cleavage. See, e.g., Liu et al. (2019) Nature 566(7743):218-223, herein incorporated by reference in its entirety for all purposes.

[0493] Another example of a Cas protein is CasΦ (CasPhi or Cas12j), which is uniquely found in bacteriophages. CasΦ is less than 1000 amino acids in size (e.g., 700-800 amino acids). CasΦ cleavage generates staggered 5′ overhangs. A single RuvC active site in CasΦ is capable of crRNA processing and DNA cutting. See, e.g., Pausch et al. (2020) Science 369(6501):333-337, herein incorporated by reference in its entirety for all purposes.

[0494] Cas proteins can be wild type proteins (i.e., those that occur in nature), modified Cas proteins (i.e., Cas protein variants), or fragments of wild type or modified Cas proteins. Cas proteins can also be active variants or fragments with respect to catalytic activity of wild type or modified Cas proteins. Active variants or fragments with respect to catalytic activity can comprise at least 80%, 85%, 90%, 91%, 92%, 93%, 94%, 95%, 96%, 97%, 98%, 99% or more sequence identity to the wild type or modified Cas protein or a portion thereof, wherein the active variants retain the ability to cut at a desired cleavage site and hence retain nick-inducing or double-strand-break-inducing activity. Assays for nick-inducing or double-strand-break-inducing activity are known and generally measure the overall activity and specificity of the Cas protein on DNA substrates containing the cleavage site.

[0495] One example of a modified Cas protein is the modified SpCas9-HF1 protein, which is a high-fidelity variant of Streptococcus pyogenes Cas9 harboring alterations (N497A/R661A/Q695A/Q926A) designed to reduce non-specific DNA contacts. See, e.g., Kleinstiver et al. (2016) Nature 529(7587):490-495, herein incorporated by reference in its entirety for all purposes. Another example of a modified Cas protein is the modified eSpCas9 variant (K848A/K1003A/R1060A) designed to reduce off-target effects. See, e.g., Slaymaker et al. (2016) Science 351(6268):84-88, herein incorporated by reference in its entirety for all purposes. Other SpCas9 variants include K855A and K810A/K1003A/R1060A. These and other modified Cas proteins are reviewed, e.g., in Cebrian-Serrano and Davies (2017) Mamm. Genome 28(7):247-261, herein incorporated by reference in its entirety for all purposes. Another example of a modified Cas9 protein is xCas9, which is a SpCas9 variant that can recognize an expanded range of PAM sequences. See, e.g., Hu et al. (2018) Nature 556:57-63, herein incorporated by reference in its entirety for all purposes.

[0496] Cas proteins can be modified to increase or decrease one or more of nucleic acid binding affinity, nucleic acid binding specificity, and enzymatic activity. Cas proteins can also be modified to change any other activity or property of the protein, such as stability. For example, one or more nuclease domains of the Cas protein can be modified, deleted, or inactivated, or a Cas protein can be truncated to remove domains that are not essential for the function of the protein or to optimize (e.g., enhance or reduce) the activity of or a property of the Cas protein.

[0497] Cas proteins can comprise at least one nuclease domain, such as a DNase domain. For example, a wild type Cpfl protein generally comprises a RuvC-like domain that cleaves both strands of target DNA, perhaps in a dimeric configuration. Likewise, CasX and CasΦ generally comprise a single RuvC-like domain that cleaves both strands of a target DNA. Cas proteins can also comprise at least two nuclease domains, such as DNase domains. For example, a wild type Cas9 protein generally comprises a RuvC-like nuclease domain and an HNH-like nuclease domain. The RuvC and HNH domains can each cut a different strand of double-stranded DNA to make a double-stranded break in the DNA. See, e.g., Jinek et al. (2012) Science 337(6096):816-821, herein incorporated by reference in its entirety for all purposes.

[0498] One or more of the nuclease domains can be deleted or mutated so that they are no longer functional or have reduced nuclease activity. For example, if one of the nuclease domains is deleted or mutated in a Cas9 protein, the resulting Cas9 protein can be referred to as a nickase and can generate a single-strand break within a double-stranded target DNA but not a double-strand break (i.e., it can cleave the complementary strand or the non-complementary strand, but not both). If none of the nuclease domains is deleted or mutated in a Cas9 protein, the Cas9 protein will retain double-strand-break-inducing activity. An example of a mutation that converts Cas9 into a nickase is a D10A (aspartate to alanine at position 10 of Cas9) mutation in the RuvC domain of Cas9 from S. pyogenes. Likewise, H939A (histidine to alanine at amino acid position 839), H840A (histidine to alanine at amino acid position 840), or N863A (asparagine to alanine at amino acid position N863) in the HNH domain of Cas9 from S. pyogenes can convert the Cas9 into a nickase. Other examples of mutations that convert Cas9 into a nickase include the corresponding mutations to Cas9 from S. thermophilus. See, e.g., Sapranauskas et al. (2011) Nucleic Acids Res. 39(21):9275-9282 and WO 2013/141680, each of which is herein incorporated by reference in its entirety for all purposes. Such mutations can be generated using methods such as site-directed mutagenesis, PCR-mediated mutagenesis, or total gene synthesis. Examples of other mutations creating nickases can be found, for example, in WO 2013/176772 and WO 2013/142578, each of which is herein incorporated by reference in its entirety for all purposes.

[0499] Examples of inactivating mutations in the catalytic domains of xCas9 are the same as those described above for SpCas9. Examples of inactivating mutations in the catalytic domains of Staphylococcus aureus Cas9 proteins are also known. For example, the Staphylococcus aureus Cas9 enzyme (SaCas9) may comprise a substitution at position N580 (e.g., N580A substitution) or a substitution at position D10 (e.g., D10A substitution) to generate a Cas nickase. See, e.g., WO 2016/106236, herein incorporated by reference in its entirety for all purposes. Examples of inactivating mutations in the catalytic domains of Nme2Cas9 are also known (e.g., D16A or H588A). Examples of inactivating mutations in the catalytic domains of St1Cas9 are also known (e.g., D9A, D598A, H599A, or N622A). Examples of inactivating mutations in the catalytic domains of St3Cas9 are also known (e.g., D10A or N870A). Examples of inactivating mutations in the catalytic domains of CjCas9 are also known (e.g., combination of D8A or H559A). Examples of inactivating mutations in the catalytic domains of FnCas9 and RHA FnCas9 are also known (e.g., N995A).

[0500] Examples of inactivating mutations in the catalytic domains of Cpf1 proteins are also known. With reference to Cpfl proteins from Francisella novicida U112 (FnCpf1), Acidaminococcus sp. BV3L6 (AsCpf1), Lachnospiraceae bacterium ND2006 (LbCpf1), and Moraxella bovoculi 237 (MbCpf1 Cpf1), such mutations can include mutations at positions 908, 993, or 1263 of AsCpf1 or corresponding positions in Cpf1 orthologs, or positions 832, 925, 947, or 1180 of LbCpf1 or corresponding positions in Cpf1 orthologs. Such mutations can include, for example one or more of mutations D908A, E993A, and D1263A of AsCpf1 or corresponding mutations in Cpf1 orthologs, or D832A, E925A, D947A, and D1180A of LbCpf1 or corresponding mutations in Cpf1 orthologs. See, e.g., US 2016/0208243, herein incorporated by reference in its entirety for all purposes.

[0501] Examples of inactivating mutations in the catalytic domains of CasX proteins are also known. With reference to CasX proteins from Deltaproteobacteria, D672A, E769A, and D935A (individually or in combination) or corresponding positions in other CasX orthologs are inactivating. See, e.g., Liu et al. (2019) Nature 566(7743):218-223, herein incorporated by reference in its entirety for all purposes.

[0502] Examples of inactivating mutations in the catalytic domains of CasΦ proteins are also known. For example, D371A and D394A, alone or in combination, are inactivating mutations. See, e.g., Pausch et al. (2020) Science 369(6501):333-337, herein incorporated by reference in its entirety for all purposes.

[0503] Cas proteins can also be operably linked to heterologous polypeptides as fusion proteins. For example, a Cas protein can be fused to a cleavage domain. See WO 2014/089290, herein incorporated by reference in its entirety for all purposesCas proteins can also be fused to a heterologous polypeptide providing increased or decreased stability. The fused domain or heterologous polypeptide can be located at the N-terminus, the C-terminus, or internally within the Cas protein.

[0504] As one example, a Cas protein can be fused to one or more heterologous polypeptides that provide for subcellular localization. Such heterologous polypeptides can include, for example, one or more nuclear localization signals (NLS) such as the monopartite SV40 NLS and/or a bipartite alpha-importin NLS for targeting to the nucleus, a mitochondrial localization signal for targeting to the mitochondria, an ER retention signal, and the like. See, e.g., Lange et al. (2007) J. Biol. Chem. 282(8):5101-5105, herein incorporated by reference in its entirety for all purposes. Such subcellular localization signals can be located at the N-terminus, the C-terminus, or anywhere within the Cas protein. An NLS can comprise a stretch of basic amino acids, and can be a monopartite sequence or a bipartite sequence. Optionally, a Cas protein can comprise two or more NLSs, including an NLS (e.g., an alpha-importin NLS or a monopartite NLS) at the N-terminus and an NLS (e.g., an SV40 NLS or a bipartite NLS) at the C-terminus. A Cas protein can also comprise two or more NLSs at the N-terminus and/or two or more NLSs at the C-terminus.

[0505] A Cas protein may, for example, be fused with 1-10 NLSs (e.g., fused with 1-5 NLSs or fused with one NLS. Where one NLS is used, the NLS may be linked at the N-terminus or the C-terminus of the Cas protein sequence. It may also be inserted within the Cas protein sequence. Alternatively, the Cas protein may be fused with more than one NLS. For example, the Cas protein may be fused with 2, 3, 4, or 5 NLSs. In a specific example, the Cas protein may be fused with two NLSs. In certain circumstances, the two NLSs may be the same (e.g., two SV40 NLSs) or different. For example, the Cas protein can be fused to two SV40 NLS sequences linked at the carboxy terminus. Alternatively, the Cas protein may be fused with two NLSs, one linked at the N-terminus and one at the C-terminus. In other examples, the Cas protein may be fused with 3 NLSs or with no NLS. The NLS may be a monopartite sequence, such as, e.g., the SV40 NLS, PKKKRKV (SEQ ID NO: 13) or PKKKRRV (SEQ ID NO: 14). The NLS may be a bipartite sequence, such as the NLS of nucleoplasmin, KRPAATKKAGQAKKKK (SEQ ID NO: 15). In a specific example, a single PKKKRKV (SEQ ID NO: 13) NLS may be linked at the C-terminus of the Cas protein. One or more linkers are optionally included at the fusion site.

[0506] Cas proteins can also be operably linked to a cell-penetrating domain or protein transduction domain. For example, the cell-penetrating domain can be derived from the HIV-1 TAT protein, the TLM cell-penetrating motif from human hepatitis B virus, MPG, Pep-1, VP22, a cell penetrating peptide from Herpes simplex virus, or a polyarginine peptide sequence. See, e.g., WO 2014/089290 and WO 2013/176772, each of which is herein incorporated by reference in its entirety for all purposes. The cell-penetrating domain can be located at the N-terminus, the C-terminus, or anywhere within the Cas protein.

[0507] Cas proteins can also be operably linked to a heterologous polypeptide for ease of tracking or purification, such as a fluorescent protein, a purification tag, or an epitope tag. Examples of fluorescent proteins include green fluorescent proteins (e.g., GFP, GFP-2, tagGFP, turboGFP, eGFP, Emerald, Azami Green, Monomeric Azami Green, CopGFP, AceGFP, ZsGreenl), yellow fluorescent proteins (e.g., YFP, eYFP, Citrine, Venus, YPet, PhiYFP, ZsYellowl), blue fluorescent proteins (e.g., eBFP, eBFP2, Azurite, mKalamal, GFPuv, Sapphire, T-sapphire), cyan fluorescent proteins (e.g., eCFP, Cerulean, CyPet, AmCyanl, Midoriishi-Cyan), red fluorescent proteins (e.g., mKate, mKate2, mPlum, DsRed monomer, mCherry, mRFP1, DsRed-Express, DsRed2, DsRed-Monomer, HcRed-Tandem, HcRedl, AsRed2, eqFP611, mRaspberry, mStrawberry, Jred), orange fluorescent proteins (e.g., mOrange, mKO, Kusabira-Orange, Monomeric Kusabira-Orange, mTangerine, tdTomato), and any other suitable fluorescent protein. Examples of tags include glutathione-S-transferase (GST), chitin binding protein (CBP), maltose binding protein, thioredoxin (TRX), poly(NANP), tandem affinity purification (TAP) tag, myc, AcV5, AU1, AU5, E, ECS, E2, FLAG, hemagglutinin (HA), nus, Softag 1, Softag 3, Strep, SBP, Glu-Glu, HSV, KT3, S, S1, T7, V5, VSV-G, histidine (His), biotin carboxyl carrier protein (BCCP), and calmodulin.

[0508] Cas proteins can also be tethered to labeled nucleic acids. Such tethering (i.e., physical linking) can be achieved through covalent interactions or noncovalent interactions, and the tethering can be direct (e.g., through direct fusion or chemical conjugation, which can be achieved by modification of cysteine or lysine residues on the protein or intein modification), or can be achieved through one or more intervening linkers or adapter molecules such as streptavidin or aptamers. See, e.g., Pierce et al. (2005) Mini Rev. Med. Chem. 5(1):41-55; Duckworth et al. (2007) Angew. Chem. Int. Ed. Engl. 46(46):8819-8822; Schaeffer and Dixon (2009) Australian J. Chem. 62(10):1328-1332; Goodman et al. (2009) Chembiochem. 10(9):1551-1557; and Khatwani et al. (2012) Bioorg. Med. Chem. 20(14):4532-4539, each of which is herein incorporated by reference in its entirety for all purposes. Noncovalent strategies for synthesizing protein-nucleic acid conjugates include biotin-streptavidin and nickel-histidine methods. Covalent protein-nucleic acid conjugates can be synthesized by connecting appropriately functionalized nucleic acids and proteins using a wide variety of chemistries. Some of these chemistries involve direct attachment of the oligonucleotide to an amino acid residue on the protein surface (e.g., a lysine amine or a cysteine thiol), while other more complex schemes require post-translational modification of the protein or the involvement of a catalytic or reactive protein domain. Methods for covalent attachment of proteins to nucleic acids can include, for example, chemical cross-linking of oligonucleotides to protein lysine or cysteine residues, expressed protein-ligation, chemoenzymatic methods, and the use of photoaptamers. The labeled nucleic acid can be tethered to the C-terminus, the N-terminus, or to an internal region within the Cas protein. In one example, the labeled nucleic acid is tethered to the C-terminus or the N-terminus of the Cas protein. Likewise, the Cas protein can be tethered to the 5′ end, the 3′ end, or to an internal region within the labeled nucleic acid. That is, the labeled nucleic acid can be tethered in any orientation and polarity. For example, the Cas protein can be tethered to the 5′ end or the 3′ end of the labeled nucleic acid.

[0509] Cas proteins can be provided in any form. For example, a Cas protein can be provided in the form of a protein, such as a Cas protein complexed with a gRNA. Alternatively, a Cas protein can be provided in the form of a nucleic acid encoding the Cas protein, such as an RNA (e.g., messenger RNA (mRNA)) or DNA. Optionally, the nucleic acid encoding the Cas protein can be codon optimized for efficient translation into protein in a particular cell or organism. For example, the nucleic acid encoding the Cas protein can be modified to substitute codons having a higher frequency of usage in a bacterial cell, a yeast cell, a human cell, a non-human cell, a mammalian cell, a rodent cell, a mouse cell, a rat cell, or any other host cell of interest, as compared to the naturally occurring polynucleotide sequence. When a nucleic acid encoding the Cas protein is introduced into the cell, the Cas protein can be transiently, conditionally, or constitutively expressed in the cell.

[0510] Nucleic acids encoding Cas proteins can be stably integrated in the genome of a cell and operably linked to a promoter active in the cell. Alternatively, nucleic acids encoding Cas proteins can be operably linked to a promoter in an expression construct. Expression constructs include any nucleic acid constructs capable of directing expression of a gene or other nucleic acid sequence of interest (e.g., a Cas gene) and which can transfer such a nucleic acid sequence of interest to a target cell. For example, the nucleic acid encoding the Cas protein can be in a vector comprising a DNA encoding a gRNA. Alternatively, it can be in a vector or plasmid that is separate from the vector comprising the DNA encoding the gRNA. Promoters that can be used in an expression construct include promoters active, for example, in one or more of a eukaryotic cell, a human cell, a non-human cell, a mammalian cell, a non-human mammalian cell, a rodent cell, a mouse cell, a rat cell, a pluripotent cell, an embryonic stem (ES) cell, an adult stem cell, a developmentally restricted progenitor cell, an induced pluripotent stem (iPS) cell, or a one-cell stage embryo. Such promoters can be, for example, conditional promoters, inducible promoters, constitutive promoters, or tissue-specific promoters. Optionally, the promoter can be a bidirectional promoter driving expression of both a Cas protein in one direction and a guide RNA in the other direction. Such bidirectional promoters can consist of (1) a complete, conventional, unidirectional Pol III promoter that contains 3 external control elements: a distal sequence element (DSE), a proximal sequence element (PSE), and a TATA box; and (2) a second basic Pol III promoter that includes a PSE and a TATA box fused to the 5′ terminus of the DSE in reverse orientation. For example, in the H1 promoter, the DSE is adjacent to the PSE and the TATA box, and the promoter can be rendered bidirectional by creating a hybrid promoter in which transcription in the reverse direction is controlled by appending a PSE and TATA box derived from the U6 promoter. See, e.g., US 2016/0074535, herein incorporated by references in its entirety for all purposes. Use of a bidirectional promoter to express genes encoding a Cas protein and a guide RNA simultaneously allow for the generation of compact expression cassettes to facilitate delivery. In preferred embodiments, promotors are accepted by regulatory authorities for use in humans. In certain embodiments, promotors drive expression in a liver cell.

[0511] Different promoters can be used to drive Cas expression or Cas9 expression. In some methods, small promoters are used so that the Cas or Cas9 coding sequence can fit into an AAV construct. For example, Cas or Cas9 and one or more gRNAs (e.g., 1 gRNA or 2 gRNAs or 3 gRNAs or 4 gRNAs) can be delivered via LNP-mediated delivery (e.g., in the form of RNA) or adeno-associated virus (AAV)-mediated delivery (e.g., AAV2-mediated delivery, AAV5-mediated delivery, AAV8-mediated delivery, or AAV7m8-mediated delivery). For example, the nuclease agent can be CRISPR/Cas9, and a Cas9 mRNA and a gRNA targeting an intron 1 of an endogenous human ALB locus can be delivered via LNP-mediated delivery or AAV-mediated delivery. The Cas or Cas9 and the gRNA(s) can be delivered in a single AAV or via two separate AAVs. For example, a first AAV can carry a Cas or Cas9 expression cassette, and a second AAV can carry a gRNA expression cassette. Similarly, a first AAV can carry a Cas or Cas9 expression cassette, and a second AAV can carry two or more gRNA expression cassettes. Alternatively, a single AAV can carry a Cas or Cas9 expression cassette (e.g., Cas or Cas9 coding sequence operably linked to a promoter) and a gRNA expression cassette (e.g., gRNA coding sequence operably linked to a promoter). Similarly, a single AAV can carry a Cas or Cas9 expression cassette (e.g., Cas or Cas9 coding sequence operably linked to a promoter) and two or more gRNA expression cassettes (e.g., gRNA coding sequences operably linked to promoters). Different promoters can be used to drive expression of the gRNA, such as a U6 promoter or the small tRNA Gln. Likewise, different promoters can be used to drive Cas9 expression. For example, small promoters are used so that the Cas9 coding sequence can fit into an AAV construct. Similarly, small Cas9 proteins (e.g., SaCas9 or CjCas9 are used to maximize the AAV packaging capacity).

[0512] Cas proteins provided as mRNAs can be modified for improved stability and/or immunogenicity properties. The modifications may be made to one or more nucleosides within the mRNA. Examples of chemical modifications to mRNA nucleobases include pseudouridine, 1-methyl-pseudouridine, and 5-methyl-cytidine. mRNA encoding Cas proteins can also be capped. The cap can be, for example, a cap 1 structure in which the +1 ribonucleotide is methylated at the 2′O position of the ribose. The capping can, for example, give superior activity in vivo (e.g., by mimicking a natural cap), can result in a natural structure that reduce stimulation of the innate immune system of the host (e.g., can reduce activation of pattern recognition receptors in the innate immune system). mRNA encoding Cas proteins can also be polyadenylated (to comprise a poly(A) tail). mRNA encoding Cas proteins can also be modified to include pseudouridine (e.g., can be fully substituted with pseudouridine). As another example, capped and polyadenylated Cas mRNA containing N1-methyl-pseudouridine can be used. mRNA encoding Cas proteins can also be modified to include N1-methyl-pseudouridine (e.g., can be fully substituted with N1-methyl-pseudouridine). As another example, Cas mRNA fully substituted with pseudouridine can be used (i.e., all standard uracil residues are replaced with pseudouridine, a uridine isomer in which the uracil is attached with a carbon-carbon bond rather than nitrogen-carbon). As another example, Cas mRNA fully substituted with N1-methyl-pseudouridine can be used (i.e., all standard uracil residues are replaced with N1-methyl-pseudouridine). Likewise, Cas mRNAs can be modified by depletion of uridine using synonymous codons. For example, capped and polyadenylated Cas mRNA fully substituted with pseudouridine can be used. For example, capped and polyadenylated Cas mRNA fully substituted with N1-methyl-pseudouridine can be used.

[0513] Cas mRNAs can comprise a modified uridine at least at one, a plurality of, or all uridine positions. The modified uridine can be a uridine modified at the 5 position (e.g., with a halogen, methyl, or ethyl). The modified uridine can be a pseudouridine modified at the 1 position (e.g., with a halogen, methyl, or ethyl). The modified uridine can be, for example, pseudouridine, N1-methyl-pseudouridine, 5-methoxyuridine, 5-iodouridine, or a combination thereof. In some examples, the modified uridine is 5-methoxyuridine. In some examples, the modified uridine is 5-iodouridine. In some examples, the modified uridine is pseudouridine. In some examples, the modified uridine is N1-methyl-pseudouridine. In some examples, the modified uridine is a combination of pseudouridine and N1-methyl-pseudouridine. In some examples, the modified uridine is a combination of pseudouridine and 5-methoxyuridine. In some examples, the modified uridine is a combination of N1-methyl pseudouridine and 5-methoxyuridine. In some examples, the modified uridine is a combination of 5-iodouridine and N1-methyl-pseudouridine. In some examples, the modified uridine is a combination of pseudouridine and 5-iodouridine. In some examples, the modified uridine is a combination of 5-iodouridine and 5-methoxyuridine.

[0514] Cas mRNAs disclosed herein can also comprise a 5′ cap, such as a Cap0, Cap1, or Cap2. A 5′ cap is generally a 7-methylguanine ribonucleotide (which may be further modified, e.g., with respect to ARCA) linked through a 5′-triphosphate to the 5′ position of the first nucleotide of the 5′-to-3′ chain of the mRNA (i.e., the first cap-proximal nucleotide). In Cap0, the riboses of the first and second cap-proximal nucleotides of the mRNA both comprise a 2′-hydroxyl. In Cap1, the riboses of the first and second transcribed nucleotides of the mRNA comprise a 2′-methoxy and a 2′-hydroxyl, respectively. In Cap2, the riboses of the first and second cap-proximal nucleotides of the mRNA both comprise a 2′-methoxy. See, e.g., Katibah et al. (2014) Proc. Natl. Acad. Sci. U.S.A. 111(33):12025-30 and Abbas et al. (2017) Proc. Natl. Acad. Sci. U.S.A. 114(11):E2106-E2115, each of which is herein incorporated by reference in its entirety for all purposes. Most endogenous higher eukaryotic mRNAs, including mammalian mRNAs such as human mRNAs, comprise Cap1 or Cap2. Cap0 and other cap structures differing from Cap1 and Cap2 may be immunogenic in mammals, such as humans, due to recognition as non-self by components of the innate immune system such as IFIT-1 and IFIT-5, which can result in elevated cytokine levels including type I interferon. Components of the innate immune system such as IFIT-1 and IFIT-5 may also compete with eIF4E for binding of an mRNA with a cap other than Cap1 or Cap2, potentially inhibiting translation of the mRNA.

[0515] A cap can be included co-transcriptionally. For example, ARCA (anti-reverse cap analog; Thermo Fisher Scientific Cat. No. AM8045) is a cap analog comprising a 7-methylguanine 3′-methoxy-5′-triphosphate linked to the 5′ position of a guanine ribonucleotide which can be incorporated in vitro into a transcript at initiation. ARCA results in a Cap0 cap in which the 2′ position of the first cap-proximal nucleotide is hydroxyl. See, e.g., Stepinski et al. (2001) RNA 7:1486-1495, herein incorporated by reference in its entirety for all purposes.

[0516] CleanCap^{Tm} AG (m7G(5′)ppp(5′)(2′OMeA)pG; TriLink Biotechnologies Cat. No. N-7113) or CleanCap^{Tm} GG (m7G(5′)ppp(5′)(2′OMeG)pG; TriLink Biotechnologies Cat. No. N-7133) can be used to provide a Cap1 structure co-transcriptionally. 3′-O-methylated versions of CleanCap™ AG and CleanCap™ GG are also available from TriLink Biotechnologies as Cat. Nos. N-7413 and N-7433, respectively.

[0517] Alternatively, a cap can be added to an RNA post-transcriptionally. For example, Vaccinia capping enzyme is commercially available (New England Biolabs Cat. No. M2080S) and has RNA triphosphatase and guanylyltransferase activities, provided by its D1 subunit, and guanine methyltransferase, provided by its D12 subunit. As such, it can add a 7-methylguanine to an RNA, so as to give Cap0, in the presence of S-adenosyl methionine and GTP. See, e.g., Guo and Moss (1990) Proc. Natl. Acad. Sci. U.S.A. 87:4023-4027 and Mao and Shuman (1994) J. Biol. Chem. 269:24472-24479, each of which is herein incorporated by reference in its entirety for all purposes.

[0518] Cas mRNAs can further comprise a poly-adenylated (poly-A or poly(A) or poly-adenine) tail. The poly-A tail can, for example, comprise at least 20, at least 30, at least 40, at least 50, at least 60, at least 70, at least 80, at least 90, or at least 100 adenines, and optionally up to 300 adenines. For example, the poly-A tail can comprise 95, 96, 97, 98, 99, or 100 adenine nucleotides.

### Guide RNAs

[0519] A “guide RNA” or “gRNA” is an RNA molecule that binds to a Cas protein (e.g., Cas9 protein) and targets the Cas protein to a specific location within a target DNA. Guide RNAs can comprise two segments: a “DNA-targeting segment” (also called “guide sequence”) and a “protein-binding segment.” “Segment” includes a section or region of a molecule, such as a contiguous stretch of nucleotides in an RNA. Some gRNAs, such as those for Cas9, can comprise two separate RNA molecules: an “activator-RNA” (e.g., tracrRNA) and a “targeter-RNA” (e.g., CRISPR RNA or crRNA). Other gRNAs are a single RNA molecule (single RNA polynucleotide), which can also be called a “single-molecule gRNA,” a “single-guide RNA,” or an “sgRNA.” See, e.g., WO 2013/176772, WO 2014/065596, WO 2014/089290, WO 2014/093622, WO 2014/099750, WO 2013/142578, and WO 2014/131833, each of which is herein incorporated by reference in its entirety for all purposes. A guide RNA can refer to either a CRISPR RNA (crRNA) or the combination of a crRNA and a trans-activating CRISPR RNA (tracrRNA). The crRNA and tracrRNA can be associated as a single RNA molecule (single guide RNA or sgRNA) or in two separate RNA molecules (dual guide RNA or dgRNA). For Cas9, for example, a single-guide RNA can comprise a crRNA fused to a tracrRNA (e.g., via a linker). For Cpfl and CasΦ, for example, only a crRNA is needed to achieve binding to a target sequence. The terms “guide RNA” and “gRNA” include both double-molecule (i.e., modular) gRNAs and single-molecule gRNAs. In some of the methods and compositions disclosed herein, a gRNA is a S. pyogenes Cas9 gRNA or an equivalent thereof. In some of the methods and compositions disclosed herein, a gRNA is a S. aureus Cas9 gRNA or an equivalent thereof.

[0520] An exemplary two-molecule gRNA comprises a crRNA-like (“CRISPR RNA” or “targeter-RNA” or “crRNA” or “crRNA repeat”) molecule and a corresponding tracrRNA-like (“trans-activating CRISPR RNA” or “activator-RNA” or “tracrRNA”) molecule. A crRNA comprises both the DNA-targeting segment (single-stranded) of the gRNA and a stretch of nucleotides that forms one half of the dsRNA duplex of the protein-binding segment of the gRNA. An example of a crRNA tail (e.g., for use with S. pyogenes Cas9), located downstream (3′) of the DNA-targeting segment, comprises, consists essentially of, or consists of GUUUUAGAGCUAUGCU (SEQ ID NO: 16) or GUUUUAGAGCUAUGCUGUUUUG (SEQ ID NO: 17). Any of the DNA-targeting segments disclosed herein can be joined to the 5′ end of SEQ ID NO: 16 or 17 to form a crRNA.

[0521] A corresponding tracrRNA (activator-RNA) comprises a stretch of nucleotides that forms the other half of the dsRNA duplex of the protein-binding segment of the gRNA. A stretch of nucleotides of a crRNA are complementary to and hybridize with a stretch of nucleotides of a tracrRNA to form the dsRNA duplex of the protein-binding domain of the gRNA. As such, each crRNA can be said to have a corresponding tracrRNA. Examples of tracrRNA sequences (e.g., for use with S. pyogenes Cas9) comprise, consist essentially of, or consist of any one of

AGCAUAGCAAGUUAAAAUAAGGCUAGUCCGUUAUCAACUUGAAAAAGUGG
CACCGAGUCGGUGCUUU (SEQ ID NO: 18),

AAACAGCAUAGCAAGUUAAAAUAAGGCUAGUCCGUUAUCAACUUGAAAAA
GUGGCACCGAGUCGGUGCUUUU (SEQ ID NO: 19), or

GUUGGAACCAUUCAAAACAGCAUAGCAAGUUAAAAUAAGGCUAGUCCGUU
AUCAACUUGAAAAAGUGGCACCGAGUCGGUGC (SEQ ID NO: 20).

[0522] In systems in which both a crRNA and a tracrRNA are needed, the crRNA and the corresponding tracrRNA hybridize to form a gRNA. In systems in which only a crRNA is needed, the crRNA can be the gRNA. The crRNA additionally provides the single-stranded DNA-targeting segment that hybridizes to the complementary strand of a target DNA. If used for modification within a cell, the exact sequence of a given crRNA or tracrRNA molecule can be designed to be specific to the species in which the RNA molecules will be used. See, e.g., Mali et al. (2013) Science 339(6121):823-826; Jinek et al. (2012) Science 337(6096):816-821; Hwang et al. (2013) Nat. Biotechnol. 31(3):227-229; Jiang et al. (2013) Nat. Biotechnol. 31(3):233-239; and Cong et al. (2013) Science 339(6121):819-823, each of which is herein incorporated by reference in its entirety for all purposes.

[0523] The DNA-targeting segment (crRNA) of a given gRNA comprises a nucleotide sequence that is complementary to a sequence on the complementary strand of the target DNA, as described in more detail below. The DNA-targeting segment of a gRNA interacts with the target DNA in a sequence-specific manner via hybridization (i.e., base pairing). As such, the nucleotide sequence of the DNA-targeting segment may vary and determines the location within the target DNA with which the gRNA and the target DNA will interact. The DNA-targeting segment of a subject gRNA can be modified to hybridize to any desired sequence within a target DNA. Naturally occurring crRNAs differ depending on the CRISPR/Cas system and organism but often contain a targeting segment of between 21 to 72 nucleotides length, flanked by two direct repeats (DR) of a length of between 21 to 46 nucleotides (see, e.g., WO 2014/131833, herein incorporated by reference in its entirety for all purposes). In the case of S. pyogenes, the DRs are 36 nucleotides long and the targeting segment is 30 nucleotides long. The 3′ located DR is complementary to and hybridizes with the corresponding tracrRNA, which in turn binds to the Cas protein.

[0524] The DNA-targeting segment can have, for example, a length of at least about 12, at least about 15, at least about 17, at least about 18, at least about 19, at least about 20, at least about 25, at least about 30, at least about 35, or at least about 40 nucleotides. Such DNA-targeting segments can have, for example, a length from about 12 to about 100, from about 12 to about 80, from about 12 to about 50, from about 12 to about 40, from about 12 to about 30, from about 12 to about 25, or from about 12 to about 20 nucleotides. For example, the DNA targeting segment can be from about 15 to about 25 nucleotides (e.g., from about 17 to about 20 nucleotides, or about 17, 18, 19, or 20 nucleotides). See, e.g., US 2016/0024523, herein incorporated by reference in its entirety for all purposes. For Cas9 from S. pyogenes, a typical DNA-targeting segment is between 16 and 20 nucleotides in length or between 17 and 20 nucleotides in length. For Cas9 from S. aureus, a typical DNA-targeting segment is between 21 and 23 nucleotides in length. For Cpfl, a typical DNA-targeting segment is at least 16 nucleotides in length or at least 18 nucleotides in length.

[0525] In one example, the DNA-targeting segment can be about 20 nucleotides in length. However, shorter and longer sequences can also be used for the targeting segment (e.g., 15-25 nucleotides in length, such as 15, 16, 17, 18, 19, 20, 21, 22, 23, 24, or 25 nucleotides in length). The degree of identity between the DNA-targeting segment and the corresponding guide RNA target sequence (or degree of complementarity between the DNA-targeting segment and the other strand of the guide RNA target sequence) can be, for example, about 75%, about 80%, about 85%, about 90%, about 95%, or 100%. The DNA-targeting segment and the corresponding guide RNA target sequence can contain one or more mismatches. For example, the DNA-targeting segment of the guide RNA and the corresponding guide RNA target sequence can contain 1-4, 1-3, 1-2, 1, 2, 3, or 4 mismatches (e.g., where the total length of the guide RNA target sequence is at least 17, at least 18, at least 19, or at least 20 or more nucleotides). For example, the DNA-targeting segment of the guide RNA and the corresponding guide RNA target sequence can contain 1-4, 1-3, 1-2, 1, 2, 3, or 4 mismatches where the total length of the guide RNA target sequence 20 nucleotides.

[0526] As one example, a guide RNA targeting intron 1 of a human ALB gene can comprise a DNA-targeting segment (i.e., guide sequence) comprising, consisting essentially of, or consisting of the sequence (DNA-targeting segment) set forth in any one of SEQ ID NOS: 30-61. Alternatively, a guide RNA targeting intron 1 of a human ALB gene can comprise a DNA-targeting segment comprising, consisting essentially of, or consisting of at least 17, at least 18, at least 19, or at least 20 contiguous nucleotides of the sequence (DNA-targeting segment) set forth in any one of SEQ ID NOS: 30-61. Alternatively, a guide RNA targeting intron 1 of a human ALB gene can comprise a DNA-targeting segment that is at least 75%, at least 80%, at least 85%, at least 90%, or at least 95% identical to the sequence (DNA-targeting segment) set forth in any one of SEQ ID NOS: 30-61. Alternatively, a guide RNA targeting intron 1 of a human ALB gene can comprise a DNA-targeting segment that is at least 90% or at least 95% identical to the sequence (DNA-targeting segment) set forth in any one of SEQ ID NOS: 30-61. Alternatively, a guide RNA targeting intron 1 of a human ALB gene can comprise a DNA-targeting segment that is at least 75%, at least 80%, at least 85%, at least 90%, or at least 95% identical to at least 17, at least 18, at least 19, or at least 20 contiguous nucleotides of the sequence (DNA-targeting segment) set forth in any one of SEQ ID NOS: 30-61. Alternatively, a guide RNA targeting intron 1 of a human ALB gene can comprise a DNA-targeting segment that is at least 90% or at least 95% identical to at least 17, at least 18, at least 19, or at least 20 contiguous nucleotides of the sequence (DNA-targeting segment) set forth in any one of SEQ ID NOS: 30-61. Alternatively, a guide RNA targeting intron 1 of a human ALB gene can comprise a DNA-targeting segment comprising, consisting essentially of, or consisting of a sequence that differs by no more than 3, no more than 2, or no more than 1 nucleotide from the sequence (DNA-targeting segment) set forth in any one of SEQ ID NOS: 30-61. Alternatively, a guide RNA targeting intron 1 of a human ALB gene can comprise a DNA-targeting segment comprising, consisting essentially of, or consisting of a sequence that differs by no more than 3, no more than 2, or no more than 1 nucleotide from at least 17, at least 18, at least 19, or at least 20 contiguous nucleotides of the sequence (DNA-targeting segment) set forth in any one of SEQ ID NOS: 30-61.

[0527] As another example, a guide RNA targeting intron 1 of a human ALB gene can comprise a DNA-targeting segment (i.e., guide sequence) comprising, consisting essentially of, or consisting of the sequence (DNA-targeting segment) set forth in any one of SEQ ID NOS: 36, 30, 33, and 41. Alternatively, a guide RNA targeting intron 1 of a human ALB gene can comprise a DNA-targeting segment comprising, consisting essentially of, or consisting of at least 17, at least 18, at least 19, or at least 20 contiguous nucleotides of the sequence (DNA-targeting segment) set forth in any one of SEQ ID NOS: 36, 30, 33, and 41. Alternatively, a guide RNA targeting intron 1 of a human ALB gene can comprise a DNA-targeting segment that is at least 75%, at least 80%, at least 85%, at least 90%, or at least 95% identical to the sequence (DNA-targeting segment) set forth in any one of SEQ ID NOS: 36, 30, 33, and 41. Alternatively, a guide RNA targeting intron 1 of a human ALB gene can comprise a DNA-targeting segment that is at least 90% or at least 95% identical to the sequence (DNA-targeting segment) set forth in any one of SEQ ID NOS: 36, 30, 33, and 41. Alternatively, a guide RNA targeting intron 1 of a human ALB gene can comprise a DNA-targeting segment that is at least 75%, at least 80%, at least 85%, at least 90%, or at least 95% identical to at least 17, at least 18, at least 19, or at least 20 contiguous nucleotides of the sequence (DNA-targeting segment) set forth in any one of SEQ ID NOS: 36, 30, 33, and 41. Alternatively, a guide RNA targeting intron 1 of a human ALB gene can comprise a DNA-targeting segment that is at least 90% or at least 95% identical to at least 17, at least 18, at least 19, or at least 20 contiguous nucleotides of the sequence (DNA-targeting segment) set forth in any one of SEQ ID NOS: 36, 30, 33, and 41. Alternatively, a guide RNA targeting intron 1 of a human ALB gene can comprise a DNA-targeting segment comprising, consisting essentially of, or consisting of a sequence that differs by no more than 3, no more than 2, or no more than 1 nucleotide from the sequence (DNA-targeting segment) set forth in any one of SEQ ID NOS: 36, 30, 33, and 41. Alternatively, a guide RNA targeting intron 1 of a human ALB gene can comprise a DNA-targeting segment comprising, consisting essentially of, or consisting of a sequence that differs by no more than 3, no more than 2, or no more than 1 nucleotide from at least 17, at least 18, at least 19, or at least 20 contiguous nucleotides of the sequence (DNA-targeting segment) set forth in any one of SEQ ID NOS: 36, 30, 33, and 41.

[0528] As another example, a guide RNA targeting intron 1 of a human ALB gene can comprise a DNA-targeting segment (i.e., guide sequence) comprising, consisting essentially of, or consisting of the sequence (DNA-targeting segment) set forth in SEQ ID NO: 36. Alternatively, a guide RNA targeting intron 1 of a human ALB gene can comprise a DNA-targeting segment comprising, consisting essentially of, or consisting of at least 17, at least 18, at least 19, or at least 20 contiguous nucleotides of the sequence (DNA-targeting segment) set forth in SEQ ID NO: 36. Alternatively, a guide RNA targeting intron 1 of a human ALB gene can comprise a DNA-targeting segment that is at least 75%, at least 80%, at least 85%, at least 90%, or at least 95% identical to the sequence (DNA-targeting segment) set forth in SEQ ID NO: 36. Alternatively, a guide RNA targeting intron 1 of a human ALB gene can comprise a DNA-targeting segment that is at least 90% or at least 95% identical to the sequence (DNA-targeting segment) set forth in SEQ ID NO: 36. Alternatively, a guide RNA targeting intron 1 of a human ALB gene can comprise a DNA-targeting segment that is at least 75%, at least 80%, at least 85%, at least 90%, or at least 95% identical to at least 17, at least 18, at least 19, or at least 20 contiguous nucleotides of the sequence (DNA-targeting segment) set forth in SEQ ID NO: 36. Alternatively, a guide RNA targeting intron 1 of a human ALB gene can comprise a DNA-targeting segment that is at least 90% or at least 95% identical to at least 17, at least 18, at least 19, or at least 20 contiguous nucleotides of the sequence (DNA-targeting segment) set forth in SEQ ID NO: 36. Alternatively, a guide RNA targeting intron 1 of a human ALB gene can comprise a DNA-targeting segment comprising, consisting essentially of, or consisting of a sequence that differs by no more than 3, no more than 2, or no more than 1 nucleotide from the sequence (DNA-targeting segment) set forth in SEQ ID NO: 36. Alternatively, a guide RNA targeting intron 1 of a human ALB gene can comprise a DNA-targeting segment comprising, consisting essentially of, or consisting of a sequence that differs by no more than 3, no more than 2, or no more than 1 nucleotide from at least 17, at least 18, at least 19, or at least 20 contiguous nucleotides of the sequence (DNA-targeting segment) set forth in SEQ ID NO: 36.

[0529] As another example, a guide RNA targeting intron 1 of a human ALB gene can comprise a DNA-targeting segment (i.e., guide sequence) comprising, consisting essentially of, or consisting of the sequence (DNA-targeting segment) set forth in SEQ ID NO: 30. Alternatively, a guide RNA targeting intron 1 of a human ALB gene can comprise a DNA-targeting segment comprising, consisting essentially of, or consisting of at least 17, at least 18, at least 19, or at least 20 contiguous nucleotides of the sequence (DNA-targeting segment) set forth in SEQ ID NO: 30. Alternatively, a guide RNA targeting intron 1 of a human ALB gene can comprise a DNA-targeting segment that is at least 75%, at least 80%, at least 85%, at least 90%, or at least 95%identical to the sequence (DNA-targeting segment) set forth in SEQ ID NO: 30. Alternatively, a guide RNA targeting intron 1 of a human ALB gene can comprise a DNA-targeting segment that is at least 90% or at least 95% identical to the sequence (DNA-targeting segment) set forth in SEQ ID NO: 30. Alternatively, a guide RNA targeting intron 1 of a human ALB gene can comprise a DNA-targeting segment that is at least 75%, at least 80%, at least 85%, at least 90%, or at least 95% identical to at least 17, at least 18, at least 19, or at least 20 contiguous nucleotides of the sequence (DNA-targeting segment) set forth in SEQ ID NO: 30. Alternatively, a guide RNA targeting intron 1 of a human ALB gene can comprise a DNA-targeting segment that is at least 90% or at least 95% identical to at least 17, at least 18, at least 19, or at least 20 contiguous nucleotides of the sequence (DNA-targeting segment) set forth in SEQ ID NO: 30. Alternatively, a guide RNA targeting intron 1 of a human ALB gene can comprise a DNA-targeting segment comprising, consisting essentially of, or consisting of a sequence that differs by no more than 3, no more than 2, or no more than 1 nucleotide from the sequence (DNA-targeting segment) set forth in SEQ ID NO: 30. Alternatively, a guide RNA targeting intron 1 of a human ALB gene can comprise a DNA-targeting segment comprising, consisting essentially of, or consisting of a sequence that differs by no more than 3, no more than 2, or no more than 1 nucleotide from at least 17, at least 18, at least 19, or at least 20 contiguous nucleotides of the sequence (DNA-targeting segment) set forth in SEQ ID NO: 30.

[0530] As another example, a guide RNA targeting intron 1 of a human ALB gene can comprise a DNA-targeting segment (i.e., guide sequence) comprising, consisting essentially of, or consisting of the sequence (DNA-targeting segment) set forth in SEQ ID NO: 33. Alternatively, a guide RNA targeting intron 1 of a human ALB gene can comprise a DNA-targeting segment comprising, consisting essentially of, or consisting of at least 17, at least 18, at least 19, or at least 20 contiguous nucleotides of the sequence (DNA-targeting segment) set forth in SEQ ID NO: 33. Alternatively, a guide RNA targeting intron 1 of a human ALB gene can comprise a DNA-targeting segment that is at least 75%, at least 80%, at least 85%, at least 90%, or at least 95% identical to the sequence (DNA-targeting segment) set forth in SEQ ID NO: 33. Alternatively, a guide RNA targeting intron 1 of a human ALB gene can comprise a DNA-targeting segment that is at least 90% or at least 95% identical to the sequence (DNA-targeting segment) set forth in SEQ ID NO: 33. Alternatively, a guide RNA targeting intron 1 of a human ALB gene can comprise a DNA-targeting segment that is at least 75%, at least 80%, at least 85%, at least 90%, or at least 95% identical to at least 17, at least 18, at least 19, or at least 20 contiguous nucleotides of the sequence (DNA-targeting segment) set forth in SEQ ID NO: 33. Alternatively, a guide RNA targeting intron 1 of a human ALB gene can comprise a DNA-targeting segment that is at least 90% or at least 95% identical to at least 17, at least 18, at least 19, or at least 20 contiguous nucleotides of the sequence (DNA-targeting segment) set forth in SEQ ID NO: 33. Alternatively, a guide RNA targeting intron 1 of a human ALB gene can comprise a DNA-targeting segment comprising, consisting essentially of, or consisting of a sequence that differs by no more than 3, no more than 2, or no more than 1 nucleotide from the sequence (DNA-targeting segment) set forth in SEQ ID NO: 33. Alternatively, a guide RNA targeting intron 1 of a human ALB gene can comprise a DNA-targeting segment comprising, consisting essentially of, or consisting of a sequence that differs by no more than 3, no more than 2, or no more than 1 nucleotide from at least 17, at least 18, at least 19, or at least 20 contiguous nucleotides of the sequence (DNA-targeting segment) set forth in SEQ ID NO: 33.

[0531] As another example, a guide RNA targeting intron 1 of a human ALB gene can comprise a DNA-targeting segment (i.e., guide sequence) comprising, consisting essentially of, or consisting of the sequence (DNA-targeting segment) set forth in SEQ ID NO: 41. Alternatively, a guide RNA targeting intron 1 of a human ALB gene can comprise a DNA-targeting segment comprising, consisting essentially of, or consisting of at least 17, at least 18, at least 19, or at least 20 contiguous nucleotides of the sequence (DNA-targeting segment) set forth in SEQ ID NO: 41. Alternatively, a guide RNA targeting intron 1 of a human ALB gene can comprise a DNA-targeting segment that is at least 75%, at least 80%, at least 85%, at least 90%, or at least 95% identical to the sequence (DNA-targeting segment) set forth in SEQ ID NO: 41. Alternatively, a guide RNA targeting intron 1 of a human ALB gene can comprise a DNA-targeting segment that is at least 90% or at least 95% identical to the sequence (DNA-targeting segment) set forth in SEQ ID NO: 41. Alternatively, a guide RNA targeting intron 1 of a human ALB gene can comprise a DNA-targeting segment that is at least 75%, at least 80%, at least 85%, at least 90%, or at least 95% identical to at least 17, at least 18, at least 19, or at least 20 contiguous nucleotides of the sequence (DNA-targeting segment) set forth in SEQ ID NO: 41. Alternatively, a guide RNA targeting intron 1 of a human ALB gene can comprise a DNA-targeting segment that is at least 90% or at least 95% identical to at least 17, at least 18, at least 19, or at least 20 contiguous nucleotides of the sequence (DNA-targeting segment) set forth in SEQ ID NO: 41. Alternatively, a guide RNA targeting intron 1 of a human ALB gene can comprise a DNA-targeting segment comprising, consisting essentially of, or consisting of a sequence that differs by no more than 3, no more than 2, or no more than 1 nucleotide from the sequence (DNA-targeting segment) set forth in SEQ ID NO: 41. Alternatively, a guide RNA targeting intron 1 of a human ALB gene can comprise a DNA-targeting segment comprising, consisting essentially of, or consisting of a sequence that differs by no more than 3, no more than 2, or no more than 1 nucleotide from at least 17, at least 18, at least 19, or at least 20 contiguous nucleotides of the sequence (DNA-targeting segment) set forth in SEQ ID NO: 41.

TABLE 2

Human ALB Intron 1 Guide Sequences

| Guide Sequence | SEQ ID NO: |
|---|---|
| GAGCAACCUCACUCUUGUCU | 30 |
| AUGCAUUUGUUUCAAAAUAU | 31 |
| UGCAUUUGUUUCAAAAUAUU | 32 |
| AUUUAUGAGAUCAACAGCAC | 33 |
| GAUCAACAGCACAGGUUUUG | 34 |
| UUAAAUAAAGCAUAGUGCAA | 35 |
| UAAAGCAUAGUGCAAUGGAU | 36 |
| UAGUGCAAUGGAUAGGUCUU | 37 |
| UACUAAAACUUUAUUUUACU | 38 |
| AAAGUUGAACAAUAGAAAAA | 39 |
| AAUGCAUAAUCUAAGUCAAA | 40 |
| UAAUAAAAUUCAAACAUCCU | 41 |
| GCAUCUUUAAAGAAUUAUUU | 42 |
| UUUGGCAUUUAUUUCUAAAA | 43 |
| UGUAUUUGUGAAGUCUUACA | 44 |
| UCCUAGGUAAAAAAAAAAAA | 45 |
| UAAUUUUCUUUUGCGCACUA | 46 |
| UGACUGAAACUUCACAGAAU | 47 |
| GACUGAAACUUCACAGAAUA | 48 |
| UUCAUUUUAGUCUGUCUUCU | 49 |
| AUUAUCUAAGUUUGAAUAUA | 50 |
| AAUUUUUAAAAUAGUAUUCU | 51 |
| UGAAUUAUUCUUCUGUUUAA | 52 |
| AUCAUCCUGAGUUUUUCUGU | 53 |
| UUACUAAAACUUUAUUUUAC | 54 |
| ACCUUUUUUUUUUUUUACCU | 55 |
| AGUGCAAUGGAUAGGUCUUU | 56 |
| UGAUUCCUACAGAAAAACUC | 57 |
| UGGGCAAGGGAAGAAAAAAA | 58 |
| CCUCACUCUUGUCUGGGCAA | 59 |
| ACCUCACUCUUGUCUGGGCA | 60 |
| UGAGCAACCUCACUCUUGUC | 61 |

TABLE 3

Human ALB Intron 1 sgRNA Sequences.

| | |
|---|---|
| Full Sequence | Full Sequence Modified |
| GAGCAACCUCACUCUUGUCUGUUU UAGAGCUAGAAAUAGCAAGUUAAA AUAAGGCUAGUCCGUUAUCAACUU GAAAAAGUGGCACCGAGUCGGUGC UUUU (SEQ ID NO: 62) | mG^{∗}mA^{∗}mG^{∗}CAACCUCACUCUUGUCUGUUUUAGAmGmC mUmAmGmAmAmAmUmAmGmCAAGUUAAAAUAAGGCU AGUCCGUUAUCAmAmCmUmUmGmAmAmAmAmAmGmU mGmGmCmAmCmCmGmAmGmUmCmGmGmUmGmCmU^{∗}m U^{∗}mU^{∗}mU (SEQ ID NO: 94) |
| AUGCAUUUGUUUCAAAAUAUGUUU UAGAGCUAGAAAUAGCAAGUUAAA AUAAGGCUAGUCCGUUAUCAACUU GAAAAAGUGGCACCGAGUCGGUGC UUUU (SEQ ID NO: 63) | mA^{∗}mU^{∗}mG^{∗}CAUUUGUUUCAAAAUAUGUUUUAGAmGmC mUmAmGmAmAmAmUmAmGmCAAGUUAAAAUAAGGCU AGUCCGUUAUCAmAmCmUmUmGmAmAmAmAmAmGmU mGmGmCmAmCmCmGmAmGmUmCmGmGmUmGmCmU^{∗}m U^{∗}mU^{∗}mU (SEQ ID NO: 95) |
| UGCAUUUGUUUCAAAAUAUUGUUU UAGAGCUAGAAAUAGCAAGUUAAA AUAAGGCUAGUCCGUUAUCAACUU GAAAAAGUGGCACCGAGUCGGUGC UUUU (SEQ ID NO: 64) | mU^{∗}mG^{∗}mC^{∗}AUUUGUUUCAAAAUAUUGUUUUAGAmGmC mUmAmGmAmAmAmUmAmGmCAAGUUAAAAUAAGGCU AGUCCGUUAUCAmAmCmUmUmGmAmAmAmAmAmGmU mGmGmCmAmCmCmGmAmGmUmCmGmGmUmGmCmU^{∗}m U^{∗}mU^{∗}mU (SEQ ID NO: 96) |
| AUUUAUGAGAUCAACAGCACGUUU UAGAGCUAGAAAUAGCAAGUUAAA AUAAGGCUAGUCCGUUAUCAACUU GAAAAAGUGGCACCGAGUCGGUGC UUUU (SEQ ID NO: 65) | mA^{∗}mU^{∗}mU^{∗}UAUGAGAUCAACAGCACGUUUUAGAmGmC mUmAmGmAmAmAmUmAmGmCAAGUUAAAAUAAGGCU AGUCCGUUAUCAmAmCmUmUmGmAmAmAmAmAmGmU mGmGmCmAmCmCmGmAmGmUmCmGmGmUmGmCmU^{∗}m U^{∗}mU^{∗}mU (SEQ ID NO: 97) |
| GAUCAACAGCACAGGUUUUGGUUU UAGAGCUAGAAAUAGCAAGUUAAA AUAAGGCUAGUCCGUUAUCAACUU GAAAAAGUGGCACCGAGUCGGUGC UUUU (SEQ ID NO: 66) | mG^{∗}mA^{∗}mU^{∗}CAACAGCACAGGUUUUGGUUUUAGAmGmC mUmAmGmAmAmAmUmAmGmCAAGUUAAAAUAAGGCU AGUCCGUUAUCAmAmCmUmUmGmAmAmAmAmAmGmU mGmGmCmAmCmCmGmAmGmUmCmGmGmUmGmCmU^{∗}m U^{∗}mU^{∗}mU (SEQ ID NO: 98) |
| UUAAAUAAAGCAUAGUGCAAGUUU UAGAGCUAGAAAUAGCAAGUUAAA AUAAGGCUAGUCCGUUAUCAACUU GAAAAAGUGGCACCGAGUCGGUGC UUUU (SEQ ID NO: 67) | mU^{∗}mU^{∗}mA^{∗}AAUAAAGCAUAGUGCAAGUUUUAGAmGmC mUmAmGmAmAmAmUmAmGmCAAGUUAAAAUAAGGCU AGUCCGUUAUCAmAmCmUmUmGmAmAmAmAmAmGmU mGmGmCmAmCmCmGmAmGmUmCmGmGmUmGmCmU^{∗}m U^{∗}mU^{∗}mU (SEQ ID NO: 99) |
| UAAAGCAUAGUGCAAUGGAUGUUU UAGAGCUAGAAAUAGCAAGUUAAA AUAAGGCUAGUCCGUUAUCAACUU GAAAAAGUGGCACCGAGUCGGUGC UUUU (SEQ ID NO: 68) | mU^{∗}mA^{∗}mA^{∗}AGCAUAGUGCAAUGGAUGUUUUAGAmGmC mUmAmGmAmAmAmUmAmGmCAAGUUAAAAUAAGGCU AGUCCGUUAUCAmAmCmUmUmGmAmAmAmAmAmGmU mGmGmCmAmCmCmGmAmGmUmCmGmGmUmGmCmU^{∗}m U^{∗}mU^{∗}mU (SEQ ID NO: 100) |
| UAGUGCAAUGGAUAGGUCUUGUUU UAGAGCUAGAAAUAGCAAGUUAAA AUAAGGCUAGUCCGUUAUCAACUU GAAAAAGUGGCACCGAGUCGGUGC UUUU (SEQ ID NO: 69) | mU^{∗}mA^{∗}mG^{∗}UGCAAUGGAUAGGUCUUGUUUUAGAmGmC mUmAmGmAmAmAmUmAmGmCAAGUUAAAAUAAGGCU AGUCCGUUAUCAmAmCmUmUmGmAmAmAmAmAmGmU mGmGmCmAmCmCmGmAmGmUmCmGmGmUmGmCmU^{∗}m U^{∗}mU^{∗}mU (SEQ ID NO: 101) |
| UACUAAAACUUUAUUUUACUGUUU UAGAGCUAGAAAUAGCAAGUUAAA AUAAGGCUAGUCCGUUAUCAACUU GAAAAAGUGGCACCGAGUCGGUGC UUUU (SEQ ID NO: 70) | mU^{∗}mA^{∗}mC^{∗}UAAAACUUUAUUUUACUGUUUUAGAmGmC mUmAmGmAmAmAmUmAmGmCAAGUUAAAAUAAGGCU AGUCCGUUAUCAmAmCmUmUmGmAmAmAmAmAmGmU mGmGmCmAmCmCmGmAmGmUmCmGmGmUmGmCmU^{∗}m U^{∗}mU^{∗}mU (SEQ ID NO: 102) |
| AAAGUUGAACAAUAGAAAAAGUUU UAGAGCUAGAAAUAGCAAGUUAAA AUAAGGCUAGUCCGUUAUCAACUU GAAAAAGUGGCACCGAGUCGGUGC UUUU (SEQ ID NO: 71) | mA^{∗}mA^{∗}mA^{∗}GUUGAACAAUAGAAAAAGUUUUAGAmGmC mUmAmGmAmAmAmUmAmGmCAAGUUAAAAUAAGGCU AGUCCGUUAUCAmAmCmUmUmGmAmAmAmAmAmGmU mGmGmCmAmCmCmGmAmGmUmCmGmGmUmGmCmU^{∗}m U^{∗}mU^{∗}mU (SEQ ID NO: 103) |
| AAUGCAUAAUCUAAGUCAAAGUUU UAGAGCUAGAAAUAGCAAGUUAAA AUAAGGCUAGUCCGUUAUCAACUU GAAAAAGUGGCACCGAGUCGGUGC UUUU (SEQ ID NO: 72) | mA^{∗}mA^{∗}mU^{∗}GCAUAAUCUAAGUCAAAGUUUUAGAmGmC mUmAmGmAmAmAmUmAmGmCAAGUUAAAAUAAGGCU AGUCCGUUAUCAmAmCmUmUmGmAmAmAmAmAmGmU mGmGmCmAmCmCmGmAmGmUmCmGmGmUmGmCmU^{∗}m U^{∗}mU^{∗}mU (SEQ ID NO: 104) |
| UAAUAAAAUUCAAACAUCCUGUUU UAGAGCUAGAAAUAGCAAGUUAAA AUAAGGCUAGUCCGUUAUCAACUU GAAAAAGUGGCACCGAGUCGGUGC UUUU (SEQ ID NO: 73) | mU^{∗}mA^{∗}mA^{∗}UAAAAUUCAAACAUCCUGUUUUAGAmGmC mUmAmGmAmAmAmUmAmGmCAAGUUAAAAUAAGGCU AGUCCGUUAUCAmAmCmUmUmGmAmAmAmAmAmGmU mGmGmCmAmCmCmGmAmGmUmCmGmGmUmGmCmU^{∗}m U^{∗}mU^{∗}mU (SEQ ID NO: 105) |
| GCAUCUUUAAAGAAUUAUUUGUUU UAGAGCUAGAAAUAGCAAGUUAAA AUAAGGCUAGUCCGUUAUCAACUU GAAAAAGUGGCACCGAGUCGGUGC UUUU (SEQ ID NO: 74) | mG^{∗}mC^{∗}mA^{∗}UCUUUAAAGAAUUAUUUGUUUUAGAmGmC mUmAmGmAmAmAmUmAmGmCAAGUUAAAAUAAGGCU AGUCCGUUAUCAmAmCmUmUmGmAmAmAmAmAmGmU mGmGmCmAmCmCmGmAmGmUmCmGmGmUmGmCmU^{∗}m U^{∗}mU^{∗}mU (SEQ ID NO: 106) |
| UUUGGCAUUUAUUUCUAAAAGUUU UAGAGCUAGAAAUAGCAAGUUAAA AUAAGGCUAGUCCGUUAUCAACUU | mU^{∗}mU^{∗}mU^{∗}GGCAUUUAUUUCUAAAAGUUUUAGAmGmC mUmAmGmAmAmAmUmAmGmCAAGUUAAAAUAAGGCU AGUCCGUUAUCAmAmCmUmUmGmAmAmAmAmAmGmU |
| GAAAAAGUGGCACCGAGUCGGUGC UUUU (SEQ ID NO: 75) | mGmGmCmAmCmCmGmAmGmUmCmGmGmUmGmCmU^{∗}m U^{∗}mU^{∗}mU (SEQ ID NO: 107) |
| UGUAUUUGUGAAGUCUUACAGUUU UAGAGCUAGAAAUAGCAAGUUAAA AUAAGGCUAGUCCGUUAUCAACUU GAAAAAGUGGCACCGAGUCGGUGC UUUU (SEQ ID NO: 76) | mU^{∗}mG^{∗}mU^{∗}AUUUGUGAAGUCUUACAGUUUUAGAmGmC mUmAmGmAmAmAmUmAmGmCAAGUUAAAAUAAGGCU AGUCCGUUAUCAmAmCmUmUmGmAmAmAmAmAmGmU mGmGmCmAmCmCmGmAmGmUmCmGmGmUmGmCmU^{∗}m U^{∗}mU^{∗}mU (SEQ ID NO: 108) |
| UCCUAGGUAAAAAAAAAAAAGUUU UAGAGCUAGAAAUAGCAAGUUAAA AUAAGGCUAGUCCGUUAUCAACUU GAAAAAGUGGCACCGAGUCGGUGC UUUU (SEQ ID NO: 77) | mU^{∗}mC^{∗}mC^{∗}UAGGUAAAAAAAAAAAAGUUUUAGAmGmC mUmAmGmAmAmAmUmAmGmCAAGUUAAAAUAAGGCU AGUCCGUUAUCAmAmCmUmUmGmAmAmAmAmAmGmU mGmGmCmAmCmCmGmAmGmUmCmGmGmUmGmCmU^{∗}m U^{∗}mU^{∗}mU (SEQ ID NO: 109) |
| UAAUUUUCUUUUGCGCACUAGUUU UAGAGCUAGAAAUAGCAAGUUAAA AUAAGGCUAGUCCGUUAUCAACUU GAAAAAGUGGCACCGAGUCGGUGC UUUU (SEQ ID NO: 78) | mU^{∗}mA^{∗}mA^{∗}UUUUCUUUUGCGCACUAGUUUUAGAmGmC mUmAmGmAmAmAmUmAmGmCAAGUUAAAAUAAGGCU AGUCCGUUAUCAmAmCmUmUmGmAmAmAmAmAmGmU mGmGmCmAmCmCmGmAmGmUmCmGmGmUmGmCmU^{∗}m U^{∗}mU^{∗}mU (SEQ ID NO: 110) |
| UGACUGAAACUUCACAGAAUGUUU UAGAGCUAGAAAUAGCAAGUUAAA AUAAGGCUAGUCCGUUAUCAACUU GAAAAAGUGGCACCGAGUCGGUGC UUUU (SEQ ID NO: 79) | mU^{∗}mG^{∗}mA^{∗}CUGAAACUUCACAGAAUGUUUUAGAmGmC mUmAmGmAmAmAmUmAmGmCAAGUUAAAAUAAGGCU AGUCCGUUAUCAmAmCmUmUmGmAmAmAmAmAmGmU mGmGmCmAmCmCmGmAmGmUmCmGmGmUmGmCmU^{∗}m U^{∗}mU^{∗}mU (SEQ ID NO: 111) |
| GACUGAAACUUCACAGAAUAGUUU UAGAGCUAGAAAUAGCAAGUUAAA AUAAGGCUAGUCCGUUAUCAACUU GAAAAAGUGGCACCGAGUCGGUGC UUUU (SEQ ID NO: 80) | mG^{∗}mA^{∗}mC^{∗}UGAAACUUCACAGAAUAGUUUUAGAmGmC mUmAmGmAmAmAmUmAmGmCAAGUUAAAAUAAGGCU AGUCCGUUAUCAmAmCmUmUmGmAmAmAmAmAmGmU mGmGmCmAmCmCmGmAmGmUmCmGmGmUmGmCmU^{∗}m U^{∗}mU^{∗}mU (SEQ ID NO: 112) |
| UUCAUUUUAGUCUGUCUUCUGUUU UAGAGCUAGAAAUAGCAAGUUAAA AUAAGGCUAGUCCGUUAUCAACUU GAAAAAGUGGCACCGAGUCGGUGC UUUU (SEQ ID NO: 81) | mU^{∗}mU^{∗}mC^{∗}AUUUUAGUCUGUCUUCUGUUUUAGAmGmC mUmAmGmAmAmAmUmAmGmCAAGUUAAAAUAAGGCU AGUCCGUUAUCAmAmCmUmUmGmAmAmAmAmAmGmU mGmGmCmAmCmCmGmAmGmUmCmGmGmUmGmCmU^{∗}m U^{∗}mU^{∗}mU (SEQ ID NO: 113) |
| AUUAUCUAAGUUUGAAUAUAGUUU UAGAGCUAGAAAUAGCAAGUUAAA AUAAGGCUAGUCCGUUAUCAACUU GAAAAAGUGGCACCGAGUCGGUGC UUUU (SEQ ID NO: 82) | mA^{∗}mU^{∗}mU^{∗}AUCUAAGUUUGAAUAUAGUUUUAGAmGmC mUmAmGmAmAmAmUmAmGmCAAGUUAAAAUAAGGCU AGUCCGUUAUCAmAmCmUmUmGmAmAmAmAmAmGmU mGmGmCmAmCmCmGmAmGmUmCmGmGmUmGmCmU^{∗}m U^{∗}mU^{∗}mU (SEQ ID NO: 114) |
| AAUUUUUAAAAUAGUAUUCUGUUU UAGAGCUAGAAAUAGCAAGUUAAA AUAAGGCUAGUCCGUUAUCAACUU GAAAAAGUGGCACCGAGUCGGUGC UUUU (SEQ ID NO: 83) | mA^{∗}mA^{∗}mU^{∗}UUUUAAAAUAGUAUUCUGUUUUAGAmGmC mUmAmGmAmAmAmUmAmGmCAAGUUAAAAUAAGGCU AGUCCGUUAUCAmAmCmUmUmGmAmAmAmAmAmGmU mGmGmCmAmCmCmGmAmGmUmCmGmGmUmGmCmU^{∗}m U^{∗}mU^{∗}mU (SEQ ID NO: 115) |
| UGAAUUAUUCUUCUGUUUAAGUUU UAGAGCUAGAAAUAGCAAGUUAAA AUAAGGCUAGUCCGUUAUCAACUU GAAAAAGUGGCACCGAGUCGGUGC UUUU (SEQ ID NO: 84) | mU^{∗}mG^{∗}mA^{∗}AUUAUUCUUCUGUUUAAGUUUUAGAmGmC mUmAmGmAmAmAmUmAmGmCAAGUUAAAAUAAGGCU AGUCCGUUAUCAmAmCmUmUmGmAmAmAmAmAmGmU mGmGmCmAmCmCmGmAmGmUmCmGmGmUmGmCmU^{∗}m U^{∗}mU^{∗}mU (SEQ ID NO: 116) |
| AUCAUCCUGAGUUUUUCUGUGUUU UAGAGCUAGAAAUAGCAAGUUAAA AUAAGGCUAGUCCGUUAUCAACUU GAAAAAGUGGCACCGAGUCGGUGC UUUU (SEQ ID NO: 85) | mA^{∗}mU^{∗}mC^{∗}AUCCUGAGUUUUUCUGUGUUUUAGAmGmC mUmAmGmAmAmAmUmAmGmCAAGUUAAAAUAAGGCU AGUCCGUUAUCAmAmCmUmUmGmAmAmAmAmAmGmU mGmGmCmAmCmCmGmAmGmUmCmGmGmUmGmCmU^{∗}m U^{∗}mU^{∗}mU (SEQ ID NO: 117) |
| UUACUAAAACUUUAUUUUACGUUU UAGAGCUAGAAAUAGCAAGUUAAA | mU^{∗}mU^{∗}mA^{∗}CUAAAACUUUAUUUUACGUUUUAGAmGmC mUmAmGmAmAmAmUmAmGmCAAGUUAAAAUAAGGCU |
| AUAAGGCUAGUCCGUUAUCAACUU GAAAAAGUGGCACCGAGUCGGUGC UUUU (SEQ ID NO: 86) | AGUCCGUUAUCAmAmCmUmUmGmAmAmAmAmAmGmU mGmGmCmAmCmCmGmAmGmUmCmGmGmUmGmCmU^{∗}m U^{∗}mU^{∗}mU (SEQ ID NO: 118) |
| ACCUUUUUUUUUUUUUACCUGUUU UAGAGCUAGAAAUAGCAAGUUAAA AUAAGGCUAGUCCGUUAUCAACUU GAAAAAGUGGCACCGAGUCGGUGC UUUU (SEQ ID NO: 87) | mA^{∗}mC^{∗}mC^{∗}UUUUUUUUUUUUUACCUGUUUUAGAmGmC mUmAmGmAmAmAmUmAmGmCAAGUUAAAAUAAGGCU AGUCCGUUAUCAmAmCmUmUmGmAmAmAmAmAmGmU mGmGmCmAmCmCmGmAmGmUmCmGmGmUmGmCmU^{∗}m U^{∗}mU^{∗}mU (SEQ ID NO: 119) |
| AGUGCAAUGGAUAGGUCUUUGUUU UAGAGCUAGAAAUAGCAAGUUAAA AUAAGGCUAGUCCGUUAUCAACUU GAAAAAGUGGCACCGAGUCGGUGC UUUU (SEQ ID NO: 88) | mA^{∗}mG^{∗}mU^{∗}GCAAUGGAUAGGUCUUUGUUUUAGAmGmC mUmAmGmAmAmAmUmAmGmCAAGUUAAAAUAAGGCU AGUCCGUUAUCAmAmCmUmUmGmAmAmAmAmAmGmU mGmGmCmAmCmCmGmAmGmUmCmGmGmUmGmCmU^{∗}m U^{∗}mU^{∗}mU (SEQ ID NO: 120) |
| UGAUUCCUACAGAAAAACUCGUUU UAGAGCUAGAAAUAGCAAGUUAAA AUAAGGCUAGUCCGUUAUCAACUU GAAAAAGUGGCACCGAGUCGGUGC UUUU (SEQ ID NO: 89) | mU^{∗}mG^{∗}mA^{∗}UUCCUACAGAAAAACUCGUUUUAGAmGmC mUmAmGmAmAmAmUmAmGmCAAGUUAAAAUAAGGCU AGUCCGUUAUCAmAmCmUmUmGmAmAmAmAmAmGmU mGmGmCmAmCmCmGmAmGmUmCmGmGmUmGmCmU^{∗}m U^{∗}mU^{∗}mU (SEQ ID NO: 121) |
| UGGGCAAGGGAAGAAAAAAAGUUU UAGAGCUAGAAAUAGCAAGUUAAA AUAAGGCUAGUCCGUUAUCAACUU GAAAAAGUGGCACCGAGUCGGUGC UUUU (SEQ ID NO: 90) | mU^{∗}mG^{∗}mG^{∗}GCAAGGGAAGAAAAAAAGUUUUAGAmGmC mUmAmGmAmAmAmUmAmGmCAAGUUAAAAUAAGGCU AGUCCGUUAUCAmAmCmUmUmGmAmAmAmAmAmGmU mGmGmCmAmCmCmGmAmGmUmCmGmGmUmGmCmU^{∗}m U^{∗}mU^{∗}mU (SEQ ID NO: 122) |
| CCUCACUCUUGUCUGGGCAAGUUU UAGAGCUAGAAAUAGCAAGUUAAA AUAAGGCUAGUCCGUUAUCAACUU GAAAAAGUGGCACCGAGUCGGUGC UUUU (SEQ ID NO: 91) | mC^{∗}mC^{∗}mU^{∗}CACUCUUGUCUGGGCAAGUUUUAGAmGmC mUmAmGmAmAmAmUmAmGmCAAGUUAAAAUAAGGCU AGUCCGUUAUCAmAmCmUmUmGmAmAmAmAmAmGmU mGmGmCmAmCmCmGmAmGmUmCmGmGmUmGmCmU^{∗}m U^{∗}mU^{∗}mU (SEQ ID NO: 123) |
| ACCUCACUCUUGUCUGGGCAGUUU UAGAGCUAGAAAUAGCAAGUUAAA AUAAGGCUAGUCCGUUAUCAACUU GAAAAAGUGGCACCGAGUCGGUGC UUUU (SEQ ID NO: 92) | mA^{∗}mC^{∗}mC^{∗}UCACUCUUGUCUGGGCAGUUUUAGAmGmC mUmAmGmAmAmAmUmAmGmCAAGUUAAAAUAAGGCU AGUCCGUUAUCAmAmCmUmUmGmAmAmAmAmAmGmU mGmGmCmAmCmCmGmAmGmUmCmGmGmUmGmCmU^{∗}m U^{∗}mU^{∗}mU (SEQ ID NO: 124) |
| UGAGCAACCUCACUCUUGUCGUUU UAGAGCUAGAAAUAGCAAGUUAAA AUAAGGCUAGUCCGUUAUCAACUU GAAAAAGUGGCACCGAGUCGGUGC UUUU (SEQ ID NO: 93) | mU^{∗}mG^{∗}mA^{∗}GCAACCUCACUCUUGUCGUUUUAGAmGmC mUmAmGmAmAmAmUmAmGmCAAGUUAAAAUAAGGCU AGUCCGUUAUCAmAmCmUmUmGmAmAmAmAmAmGmU mGmGmCmAmCmCmGmAmGmUmCmGmGmUmGmCmU^{∗}m U^{∗}mU^{∗}mU (SEQ ID NO: 125) |

TABLE 4

Mouse Alb Intron 1 Guide Sequences

| Guide Sequence | SEQ ID NO: |
|---|---|
| CACUCUUGUCUGUGGAAACA | 164 |

TABLE 5

Mouse Alb Intron 1 sgRNA Sequences

| | |
|---|---|
| Full Sequence | Full Sequence Modified |
| CACUCUUGUCUGUGGAAACAGUUU UAGAGCUAGAAAUAGCAAGUUAAA AUAAGGCUAGUCCGUUAUCAACUU GAAAAAGUGGCACCGAGUCGGUGC UUUU (SEQ ID NO: 166) | mC^{∗}mA^{∗}mC^{∗}UCUUGUCUGUGGAAACAGUUUUAGAmGmC mUmAmGmAmAmAmUmAmGmCAAGUUAAAAUAAGGCU AGUCCGUUAUCAmAmCmUmUmGmAmAmAmAmAmGmU mGmGmCmAmCmCmGmAmGmUmCmGmGmUmGmCmU^{∗}m U^{∗}mU^{∗}mU (SEQ ID NO: 167) |

[0532] TracrRNAs can be in any form (e.g., full-length tracrRNAs or active partial tracrRNAs) and of varying lengths. They can include primary transcripts or processed forms. For example, tracrRNAs (as part of a single-guide RNA or as a separate molecule as part of a two-molecule gRNA) may comprise, consist essentially of, or consist of all or a portion of a wild type tracrRNA sequence (e.g., about or more than about 20, 26, 32, 45, 48, 54, 63, 67, 85, or more nucleotides of a wild type tracrRNA sequence). Examples of wild type tracrRNA sequences from S. pyogenes include 171-nucleotide, 89-nucleotide, 75-nucleotide, and 65-nucleotide versions. See, e.g., Deltcheva et al. (2011) Nature 471(7340):602-607; WO 2014/093661, each of which is herein incorporated by reference in its entirety for all purposes. Examples of tracrRNAs within single-guide RNAs (sgRNAs) include the tracrRNA segments found within +48, +54, +67, and +85 versions of sgRNAs, where “+n” indicates that up to the +n nucleotide of wild type tracrRNA is included in the sgRNA. See US 8,697,359, herein incorporated by reference in its entirety for all purposes.

[0533] The percent complementarity between the DNA-targeting segment of the guide RNA and the complementary strand of the target DNA can be at least 60% (e.g., at least 65%, at least 70%, at least 75%, at least 80%, at least 85%, at least 90%, at least 95%, or 100%). The percent complementarity between the DNA-targeting segment and the complementary strand of the target DNA can be at least 60% over about 20 contiguous nucleotides. As an example, the percent complementarity between the DNA-targeting segment and the complementary strand of the target DNA can be 100% over the 14 contiguous nucleotides at the 5′ end of the complementary strand of the target DNA and as low as 0% over the remainder. In such a case, the DNA-targeting segment can be considered to be 14 nucleotides in length. As another example, the percent complementarity between the DNA-targeting segment and the complementary strand of the target DNA can be 100% over the seven contiguous nucleotides at the 5′ end of the complementary strand of the target DNA and as low as 0% over the remainder. In such a case, the DNA-targeting segment can be considered to be 7 nucleotides in length. In some guide RNAs, at least 17 nucleotides within the DNA-targeting segment are complementary to the complementary strand of the target DNA. For example, the DNA-targeting segment can be 20 nucleotides in length and can comprise 1, 2, or 3 mismatches with the complementary strand of the target DNA. In one example, the mismatches are not adjacent to the region of the complementary strand corresponding to the protospacer adjacent motif (PAM) sequence (i.e., the reverse complement of the PAM sequence) (e.g., the mismatches are in the 5′ end of the DNA-targeting segment of the guide RNA, or the mismatches are at least 2, 3, 4, 5, 6, 7, 8, 9, 10, 11, 12, 13, 14, 15, 16, 17, 18, or 19 base pairs away from the region of the complementary strand corresponding to the PAM sequence).

[0534] The protein-binding segment of a gRNA can comprise two stretches of nucleotides that are complementary to one another. The complementary nucleotides of the protein-binding segment hybridize to form a double-stranded RNA duplex (dsRNA). The protein-binding segment of a subject gRNA interacts with a Cas protein, and the gRNA directs the bound Cas protein to a specific nucleotide sequence within target DNA via the DNA-targeting segment.

[0535] Single-guide RNAs can comprise a DNA-targeting segment and a scaffold sequence (i.e., the protein-binding or Cas-binding sequence of the guide RNA). For example, such guide RNAs can have a 5′ DNA-targeting segment joined to a 3′ scaffold sequence. Exemplary scaffold sequences (e.g., for use with S. pyogenes Cas9) comprise, consist essentially of, or consist of:

GUUUUAGAGCUAGAAAUAGCAAGUUAAAAUAAGGCUAGUCCGUUAUCAAC
UUGAAAAAGUGGCACCGAGUCGGUGCU (version 1; SEQ ID NO:
21);

GUUGGAACCAUUCAAAACAGCAUAGCAAGUUAAAAUAAGGCUAGUCCGUU
AUCAACUUGAAAAAGUGGCACCGAGUCGGUGC (version 2; SEQ I
D NO: 22);

GUUUUAGAGCUAGAAAUAGCAAGUUAAAAUAAGGCUAGUCCGUUAUCAAC
UUGAAAAAGUGGCACCGAGUCGGUGC (version 3; SEQ ID NO:
23); and

GUUUAAGAGCUAUGCUGGAAACAGCAUAGCAAGUUUAAAUAAGGCUAGUC
CGUUAUCAACUUGAAAAAGUGGCACCGAGUCGGUGC (version 4; S
EQ ID NO: 24);

GUUUUAGAGCUAGAAAUAGCAAGUUAAAAUAAGGCUAGUCCGUUAUCAAC
UUGAAAAAGUGGCACCGAGUCGGUGCUUUUUUU (version 5; SEQ
ID NO: 25);

GUUUUAGAGCUAGAAAUAGCAAGUUAAAAUAAGGCUAGUCCGUUAUCAAC
UUGAAAAAGUGGCACCGAGUCGGUGCUUUU (version 6; SEQ ID
NO: 26);

GUUUAAGAGCUAUGCUGGAAACAGCAUAGCAAGUUUAAAUAAGGCUAGUC
CGUUAUCAACUUGAAAAAGUGGCACCGAGUCGGUGCUUUUUU (versio
n 7; SEQ ID NO: 27);or

GUUUUAGAGCUAGAAAUAGCAAGUUAAAAUAAGGCUAGUCCGUUAUCAAC
UUGGCACCGAGUCGGUGC (version 8; SEQ ID NO: 28).

In some guide sgRNAs, the four terminalU residues of version 6 are not present. In some sgRNAs, only 1, 2, or 3 of the four terminal U residues of version 6 are present. Guide RNAs targeting any of the guide RNA target sequences disclosed herein can include, for example, a DNA-targeting segment on the 5′ end of the guide RNA fused to any of the exemplary guide RNA scaffold sequences on the 3′ end of the guide RNA. That is, any of the DNA-targeting segments disclosed herein can be joined to the 5′ end of any one of the above scaffold sequences to form a single guide RNA (chimeric guide RNA).

[0536] Guide RNAs can include modifications or sequences that provide for additional desirable features (e.g., modified or regulated stability; subcellular targeting; tracking with a fluorescent label; a binding site for a protein or protein complex; and the like). That is, guide RNAs can include one or more modified nucleosides or nucleotides, or one or more non-naturally and/or naturally occurring components or configurations that are used instead of or in addition to the canonical A, G, C, and U residues. Examples of such modifications include, for example, a 5′ cap (e.g., a 7-methylguanylate cap (m7G)); a 3′ polyadenylated tail (i.e., a 3′ poly(A) tail); a riboswitch sequence (e.g., to allow for regulated stability and/or regulated accessibility by proteins and/or protein complexes); a stability control sequence; a sequence that forms a dsRNA duplex (i.e., a hairpin); a modification or sequence that targets the RNA to a subcellular location (e.g., nucleus, mitochondria, chloroplasts, and the like); a modification or sequence that provides for tracking (e.g., direct conjugation to a fluorescent molecule, conjugation to a moiety that facilitates fluorescent detection, a sequence that allows for fluorescent detection, and so forth); a modification or sequence that provides a binding site for proteins (e.g., proteins that act on DNA, including transcriptional activators, transcriptional repressors, DNA methyltransferases, DNA demethylases, histone acetyltransferases, histone deacetylases, and the like); and combinations thereof. Other examples of modifications include engineered stem loop duplex structures, engineered bulge regions, engineered hairpins 3′ of the stem loop duplex structure, or any combination thereof. See, e.g., US 2015/0376586, herein incorporated by reference in its entirety for all purposes. A bulge can be an unpaired region of nucleotides within the duplex made up of the crRNA-like region and the minimum tracrRNA-like region. A bulge can comprise, on one side of the duplex, an unpaired 5′-XXXY-3′ where X is any purine and Y can be a nucleotide that can form a wobble pair with a nucleotide on the opposite strand, and an unpaired nucleotide region on the other side of the duplex.

[0537] Guide RNAs can comprise modified nucleosides and modified nucleotides including, for example, one or more of the following: (1) alteration or replacement of one or both of the non-linking phosphate oxygens and/or of one or more of the linking phosphate oxygens in the phosphodiester backbone linkage (an exemplary backbone modification); (2) alteration or replacement of a constituent of the ribose sugar such as alteration or replacement of the 2′ hydroxyl on the ribose sugar (an exemplary sugar modification); (3) replacement (e.g., wholesale replacement) of the phosphate moiety with dephospho linkers (an exemplary backbone modification); (4) modification or replacement of a naturally occurring nucleobase, including with a non-canonical nucleobase (an exemplary base modification); (5) replacement or modification of the ribose-phosphate backbone (an exemplary backbone modification); (6) modification of the 3′ end or 5′ end of the oligonucleotide (e.g., removal, modification or replacement of a terminal phosphate group or conjugation of a moiety, cap, or linker (such 3′ or 5′ cap modifications may comprise a sugar and/or backbone modification); and (7) modification or replacement of the sugar (an exemplary sugar modification). Other possible guide RNA modifications include modifications of or replacement of uracils or poly-uracil tracts. See, e.g., WO 2015/048577 and US 2016/0237455, each of which is herein incorporated by reference in its entirety for all purposes. Similar modifications can be made to Cas-encoding nucleic acids, such as Cas mRNAs. For example, Cas mRNAs can be modified by depletion of uridine using synonymous codons.

[0538] Chemical modifications such at hose listed above can be combined to provide modified gRNAs and/or mRNAs comprising residues (nucleosides and nucleotides) that can have two, three, four, or more modifications. For example, a modified residue can have a modified sugar and a modified nucleobase. In one example, every base of a gRNA is modified (e.g., all bases have a modified phosphate group, such as a phosphorothioate group). For example, all or substantially all of the phosphate groups of a gRNA can be replaced with phosphorothioate groups. Alternatively or additionally, a modified gRNA can comprise at least one modified residue at or near the 5′ end. Alternatively or additionally, a modified gRNA can comprise at least one modified residue at or near the 3′ end.

[0539] Some gRNAs comprise one, two, three or more modified residues. For example, at least 5%, at least 10%, at least 15%, at least 20%, at least 25%, at least 30%, at least 35%, at least 40%, at least 45%, at least 50%, at least 55%, at least 60%, at least 65%, at least 70%, at least 75%, at least 80%, at least 85%, at least 90%, at least 95%, or 100% of the positions in a modified gRNA can be modified nucleosides or nucleotides.

[0540] Unmodified nucleic acids can be prone to degradation. Exogenous nucleic acids can also induce an innate immune response. Modifications can help introduce stability and reduce immunogenicity. Some gRNAs described herein can contain one or more modified nucleosides or nucleotides to introduce stability toward intracellular or serum-based nucleases. Some modified gRNAs described herein can exhibit a reduced innate immune response when introduced into a population of cells.

[0541] The gRNAs disclosed herein can comprise a backbone modification in which the phosphate group of a modified residue can be modified by replacing one or more of the oxygens with a different substituent. The modification can include the wholesale replacement of an unmodified phosphate moiety with a modified phosphate group as described herein. Backbone modifications of the phosphate backbone can also include alterations that result in either an uncharged linker or a charged linker with unsymmetrical charge distribution.

[0542] Examples of modified phosphate groups include, phosphorothioate, phosphoroselenates, borano phosphates, borano phosphate esters, hydrogen phosphonates, phosphoroamidates, alkyl or aryl phosphonates and phosphotriesters. The phosphorous atom in an unmodified phosphate group is achiral. However, replacement of one of the non-bridging oxygens with one of the above atoms or groups of atoms can render the phosphorous atom chiral. The stereogenic phosphorous atom can possess either the “R” configuration (Rp) or the “S” configuration (Sp). The backbone can also be modified by replacement of a bridging oxygen, (i.e., the oxygen that links the phosphate to the nucleoside), with nitrogen (bridged phosphoroamidates), sulfur (bridged phosphorothioates) and carbon (bridged methylenephosphonates). The replacement can occur at either linking oxygen or at both of the linking oxygens.

[0543] The phosphate group can be replaced by non-phosphorus containing connectors in certain backbone modifications. In some embodiments, the charged phosphate group can be replaced by a neutral moiety. Examples of moieties which can replace the phosphate group can include, without limitation, e.g., methyl phosphonate, hydroxylamino, siloxane, carbonate, carboxymethyl, carbamate, amide, thioether, ethylene oxide linker, sulfonate, sulfonamide, thioformacetal, formacetal, oxime, methyleneimino, methylenemethylimino, methylenehydrazo, methylenedimethylhydrazo and methyleneoxymethylimino.

[0544] Scaffolds that can mimic nucleic acids can also be constructed wherein the phosphate linker and ribose sugar are replaced by nuclease resistant nucleoside or nucleotide surrogates. Such modifications may comprise backbone and sugar modifications. In some embodiments, the nucleobases can be tethered by a surrogate backbone. Examples can include, without limitation, the morpholino, cyclobutyl, pyrrolidine and peptide nucleic acid (PNA) nucleoside surrogates.

[0545] The modified nucleosides and modified nucleotides can include one or more modifications to the sugar group (a sugar modification). For example, the 2′ hydroxyl group (OH) can be modified (e.g., replaced with a number of different oxy or deoxy substituents. Modifications to the 2′ hydroxyl group can enhance the stability of the nucleic acid since the hydroxyl can no longer be deprotonated to form a 2′-alkoxide ion.

[0546] Examples of 2′ hydroxyl group modifications can include alkoxy or aryloxy (OR, wherein “R” can be, e.g., alkyl, cycloalkyl, aryl, aralkyl, heteroaryl or a sugar); polyethyleneglycols (PEG), O(CH₂CH₂O)ₙCH₂CH₂OR wherein R can be, e.g., H or optionally substituted alkyl, and n can be an integer from 0 to 20 (e.g., from 0 to 4, from 0 to 8, from 0 to 10, from 0 to 16, from 1 to 4, from 1 to 8, from 1 to 10, from 1 to 16, from 1 to 20, from 2 to 4, from 2 to 8, from 2 to 10, from 2 to 16, from 2 to 20, from 4 to 8, from 4 to 10, from 4 to 16, and from 4 to 20). The 2′ hydroxyl group modification can be 2′-O-Me. Likewise, the 2′ hydroxyl group modification can be a 2′-fluoro modification, which replaces the 2′ hydroxyl group with a fluoride. The 2′ hydroxyl group modification can include locked nucleic acids (LNA) in which the 2′ hydroxyl can be connected, e.g., by a C₁₋₆ alkylene or C₁₋₆ heteroalkylene bridge, to the 4′ carbon of the same ribose sugar, where exemplary bridges can include methylene, propylene, ether, or amino bridges; O-amino (wherein amino can be, e.g., NH₂; alkylamino, dialkylamino, heterocyclyl, arylamino, diarylamino, heteroarylamino, or diheteroarylamino, ethylenediamine, or polyamino) and aminoalkoxy, O(CH₂)ₙ-amino, (wherein amino can be, e.g., NH₂; alkylamino, dialkylamino, heterocyclyl, arylamino, diarylamino, heteroarylamino, or diheteroarylamino, ethylenediamine, or polyamino). The 2′ hydroxyl group modification can include unlocked nucleic acids (UNA) in which the ribose ring lacks the C2′-C3’ bond. The 2′ hydroxyl group modification can include the methoxyethyl group (MOE), (OCH₂CH₂OCH₃, e.g., a PEG derivative).

[0547] Deoxy 2′ modifications can include hydrogen (i.e. deoxyribose sugars, e.g., at the overhang portions of partially dsRNA); halo (e.g., bromo, chloro, fluoro, or iodo); amino (wherein amino can be, e.g., NH2; alkylamino, dialkylamino, heterocyclyl, arylamino, diarylamino, heteroarylamino, diheteroarylamino, or amino acid); NH(CH₂CH₂NH)ₙCH₂CH₂-amino (wherein amino can be, e.g., as described herein), -NHC(O)R (wherein R can be, e.g., alkyl, cycloalkyl, aryl, aralkyl, heteroaryl or sugar), cyano; mercapto; alkyl-thio-alkyl; thioalkoxy; and alkyl, cycloalkyl, aryl, alkenyl and alkynyl, which may be optionally substituted with e.g., an amino as described herein.

[0548] The sugar modification can comprise a sugar group which may also contain one or more carbons that possess the opposite stereochemical configuration than that of the corresponding carbon in ribose. Thus, a modified nucleic acid can include nucleotides containing e.g., arabinose, as the sugar. The modified nucleic acids can also include abasic sugars. These abasic sugars can also be further modified at one or more of the constituent sugar atoms. The modified nucleic acids can also include one or more sugars that are in the L form (e.g. L-nucleosides).

[0549] The modified nucleosides and modified nucleotides described herein, which can be incorporated into a modified nucleic acid, can include a modified base, also called a nucleobase. Examples of nucleobases include, but are not limited to, adenine (A), guanine (G), cytosine (C), and uracil (U). These nucleobases can be modified or wholly replaced to provide modified residues that can be incorporated into modified nucleic acids. The nucleobase of the nucleotide can be independently selected from a purine, a pyrimidine, a purine analog, or pyrimidine analog. In some embodiments, the nucleobase can include, for example, naturally-occurring and synthetic derivatives of a base.

[0550] In a dual guide RNA, each of the crRNA and the tracrRNA can contain modifications. Such modifications may be at one or both ends of the crRNA and/or tracrRNA. In a sgRNA, one or more residues at one or both ends of the sgRNA may be chemically modified, and/or internal nucleosides may be modified, and/or the entire sgRNA may be chemically modified. Some gRNAs comprise a 5′ end modification. Some gRNAs comprise a 3′ end modification.

[0551] The guide RNAs disclosed herein can comprise one of the modification patterns disclosed in WO 2018/107028 A1, herein incorporated by reference in its entirety for all purposes. The guide RNAs disclosed herein can also comprise one of the structures/modification patterns disclosed in US 2017/0114334, herein incorporated by reference in its entirety for all purposes. The guide RNAs disclosed herein can also comprise one of the structures/modification patterns disclosed in WO 2017/136794, WO 2017/004279, US 2018/0187186, or US 2019/0048338, each of which is herein incorporated by reference in its entirety for all purposes.

[0552] As one example, nucleotides at the 5′ or 3′ end of a guide RNA can include phosphorothioate linkages (e.g., the bases can have a modified phosphate group that is a phosphorothioate group). For example, a guide RNA can include phosphorothioate linkages between the 2, 3, or 4 terminal nucleotides at the 5′ or 3′ end of the guide RNA. As another example, nucleotides at the 5′ and/or 3′ end of a guide RNA can have 2′-O-methyl modifications. For example, a guide RNA can include 2′-O-methyl modifications at the 2, 3, or 4 terminal nucleotides at the 5′ and/or 3′ end of the guide RNA (e.g., the 5′ end). See, e.g., WO 2017/173054 A1 and Finn et al. (2018) Cell Rep. 22(9):2227-2235, each of which is herein incorporated by reference in its entirety for all purposes. Other possible modifications are described in more detail elsewhere herein. In a specific example, a guide RNA includes 2′-O-methyl analogs and 3′ phosphorothioate internucleotide linkages at the first three 5′ and 3′ terminal RNA residues. Such chemical modifications can, for example, provide greater stability and protection from exonucleases to guide RNAs, allowing them to persist within cells for longer than unmodified guide RNAs. Such chemical modifications can also, for example, protect against innate intracellular immune responses that can actively degrade RNA or trigger immune cascades that lead to cell death.

[0553] As one example, any of the guide RNAs described herein can comprise at least one modification. In one example, the at least one modification comprises a 2′-O-methyl (2′-O-Me) modified nucleotide, a phosphorothioate (PS) bond between nucleotides, a 2′-fluoro (2′-F) modified nucleotide, or a combination thereof. For example, the at least one modification can comprise a 2′-O-methyl (2′-O-Me) modified nucleotide. Alternatively or additionally, the at least one modification can comprise a phosphorothioate (PS) bond between nucleotides. Alternatively or additionally, the at least one modification can comprise a 2′-fluoro (2′-F) modified nucleotide. In one example, a guide RNA described herein comprises one or more 2′-O-methyl (2′-O-Me) modified nucleotides and one or more phosphorothioate (PS) bonds between nucleotides.

[0554] The modifications can occur anywhere in the guide RNA. As one example, the guide RNA comprises a modification at one or more of the first five nucleotides at the 5′ end of the guide RNA, the guide RNA comprises a modification at one or more of the last five nucleotides of the 3′ end of the guide RNA, or a combination thereof. For example, the guide RNA can comprise phosphorothioate bonds between the first four nucleotides of the guide RNA, phosphorothioate bonds between the last four nucleotides of the guide RNA, or a combination thereof. Alternatively or additionally, the guide RNA can comprise 2′-O-Me modified nucleotides at the first three nucleotides at the 5′ end of the guide RNA, can comprise 2′-O-Me modified nucleotides at the last three nucleotides at the 3′ end of the guide RNA, or a combination thereof.

[0555] In one example, a modified gRNA can comprise the following sequence: mN^{∗}mN^{∗}mN^{∗}NNNNNNNNNNNNNNNNNGUUUUAGAmGmCmUmAmGmAmAmAmUmA mGmCAAGUUAAAAUAAGGCUAGUCCGUUAUCAmAmCmUmUmGmAmAmAmAmAm GmUmGmGmCmAmCmCmGmAmGmUmCmGmGmUmGmCmU^{∗}mU^{∗}mU^{∗}mU (SEQ ID NO: 29), where “N” may be any natural or non-natural nucleotide. For example, the totality of N residues comprise a human ALB intron 1 DNA-targeting segment as described herein (e.g., the sequence set forth in SEQ ID NO: 29, wherein the N residues are replaced with the DNA-targeting segment of any one of SEQ ID NOS: 30-61, the DNA-targeting segment of any one of SEQ ID NOS: 36, 30, 33, and 41, or the DNA-targeting segment of SEQ ID NO: 36. For example, a modified gRNA can comprise the sequence set forth in any one of SEQ ID NOS: 94-125, the sequence set forth in any one of SEQ ID NOS: 100, 94, 97, and 105, or the sequence set forth in SEQ ID NO: 100 in Table 3. The terms “mA,” “mC,” “mU,” and “mG” denote a nucleotide (A, C, U, and G, respectively) that has been modified with 2′-O-Me. The symbol “^{∗}” depicts a phosphorothioate modification. In certain embodiments, A, C, G, U, and N independently denote a ribose sugar, i.e., 2′-OH. In certain embodiments in the context of a modified sequence, A, C, G, U, and N denote a ribose sugar, i.e., 2′-OH. A phosphorothioate linkage or bond refers to a bond where a sulfur is substituted for one nonbridging phosphate oxygen in a phosphodiester linkage, for example in the bonds between nucleotides bases. When phosphorothioates are used to generate oligonucleotides, the modified oligonucleotides may also be referred to as S-oligos. The terms A^{∗}, C^{∗}, U^{∗}, or G^{∗} denote a nucleotide that is linked to the next (e.g., 3′) nucleotide with a phosphorothioate bond. The terms “mA^{∗},” “mC^{∗},” “mU^{∗},” and “mG^{∗}” denote a nucleotide (A, C, U, and G, respectively) that has been substituted with 2′-O-Me and that is linked to the next (e.g., 3′) nucleotide with a phosphorothioate bond.

[0556] Another chemical modification that has been shown to influence nucleotide sugar rings is halogen substitution. For example, 2′-fluoro (2′-F) substitution on nucleotide sugar rings can increase oligonucleotide binding affinity and nuclease stability. Abasic nucleotides refer to those which lack nitrogenous bases. Inverted bases refer to those with linkages that are inverted from the normal 5′ to 3′ linkage (i.e., either a 5′ to 5′ linkage or a 3′ to 3′ linkage).

[0557] An abasic nucleotide can be attached with an inverted linkage. For example, an abasic nucleotide may be attached to the terminal 5′ nucleotide via a 5′ to 5′ linkage, or an abasic nucleotide may be attached to the terminal 3′ nucleotide via a 3′ to 3′ linkage. An inverted abasic nucleotide at either the terminal 5′ or 3′ nucleotide may also be called an inverted abasic end cap.

[0558] In one example, one or more of the first three, four, or five nucleotides at the 5′ terminus, and one or more of the last three, four, or five nucleotides at the 3′ terminus are modified. The modification can be, for example, a 2′-O-Me, 2′-F, inverted abasic nucleotide, phosphorothioate bond, or other nucleotide modification well known to increase stability and/or performance.

[0559] In another example, the first four nucleotides at the 5′ terminus, and the last four nucleotides at the 3′ terminus can be linked with phosphorothioate bonds.

[0560] In another example, the first three nucleotides at the 5′ terminus, and the last three nucleotides at the 3′ terminus can comprise a 2′-O-methyl (2′-O-Me) modified nucleotide. In another example, the first three nucleotides at the 5′ terminus, and the last three nucleotides at the 3′ terminus comprise a 2′-fluoro (2′-F) modified nucleotide. In another example, the first three nucleotides at the 5′ terminus, and the last three nucleotides at the 3′ terminus comprise an inverted abasic nucleotide.

[0561] Guide RNAs can be provided in any form. For example, the gRNA can be provided in the form of RNA, either as two molecules (separate crRNA and tracrRNA) or as one molecule (sgRNA), and optionally in the form of a complex with a Cas protein. The gRNA can also be provided in the form of DNA encoding the gRNA. The DNA encoding the gRNA can encode a single RNA molecule (sgRNA) or separate RNA molecules (e.g., separate crRNA and tracrRNA). In the latter case, the DNA encoding the gRNA can be provided as one DNA molecule or as separate DNA molecules encoding the crRNA and tracrRNA, respectively.

[0562] When a gRNA is provided in the form of DNA, the gRNA can be transiently, conditionally, or constitutively expressed in the cell. DNAs encoding gRNAs can be stably integrated into the genome of the cell and operably linked to a promoter active in the cell. Alternatively, DNAs encoding gRNAs can be operably linked to a promoter in an expression construct. For example, the DNA encoding the gRNA can be in a vector comprising a heterologous nucleic acid, such as a nucleic acid encoding a Cas protein. Alternatively, it can be in a vector or a plasmid that is separate from the vector comprising the nucleic acid encoding the Cas protein. Promoters that can be used in such expression constructs include promoters active, for example, in one or more of a eukaryotic cell, a human cell, a non-human cell, a mammalian cell, a non-human mammalian cell, a rodent cell, a mouse cell, a rat cell, a pluripotent cell, an embryonic stem (ES) cell, an adult stem cell, a developmentally restricted progenitor cell, an induced pluripotent stem (iPS) cell, or a one-cell stage embryo. Such promoters can be, for example, conditional promoters, inducible promoters, constitutive promoters, or tissue-specific promoters. Such promoters can also be, for example, bidirectional promoters. Specific examples of suitable promoters include an RNA polymerase III promoter, such as a human U6 promoter, a rat U6 polymerase III promoter, or a mouse U6 polymerase III promoter.

[0563] Alternatively, gRNAs can be prepared by various other methods. For example, gRNAs can be prepared by in vitro transcription using, for example, T7 RNA polymerase (see, e.g., WO 2014/089290 and WO 2014/065596, each of which is herein incorporated by reference in its entirety for all purposes). Guide RNAs can also be a synthetically produced molecule prepared by chemical synthesis. For example, a guide RNA can be chemically synthesized to include 2′-O-methyl analogs and 3′ phosphorothioate internucleotide linkages at the first three 5′ and 3′ terminal RNA residues.

[0564] Guide RNAs (or nucleic acids encoding guide RNAs) can be in compositions comprising one or more guide RNAs (e.g., 1, 2, 3, 4, or more guide RNAs) and a carrier increasing the stability of the guide RNA (e.g., prolonging the period under given conditions of storage (e.g., -20° C., 4° C., or ambient temperature) for which degradation products remain below a threshold, such below 0.5% by weight of the starting nucleic acid or protein; or increasing the stability in vivo). Non-limiting examples of such carriers include poly(lactic acid) (PLA) microspheres, poly(D,L-lactic-coglycolic-acid) (PLGA) microspheres, liposomes, micelles, inverse micelles, lipid cochleates, and lipid microtubules. Such compositions can further comprise a Cas protein, such as a Cas9 protein, or a nucleic acid encoding a Cas protein.

[0565] As one example, a guide RNA targeting intron 1 of a human ALB gene can comprise, consist essentially of, or consist of the sequence set forth in any one of SEQ ID NOS: 62-125. Alternatively, a guide RNA targeting intron 1 of a human ALB gene can comprise, consist essentially of, or consist of a sequence that is at least 75%, at least 80%, at least 85%, at least 90%, or at least 95% identical to the DNA-targeting segment set forth in any one of SEQ ID NOS: 62-125. Alternatively, a guide RNA targeting intron 1 of a human ALB gene can comprise, consist essentially of, or consist of a sequence that is at least 90% or at least 95% identical to the DNA-targeting segment set forth in any one of SEQ ID NOS: 62-125. Alternatively, a guide RNA targeting intron 1 of a human ALB gene can comprise, consist essentially of, or consist of a sequence that differs by no more than 3, no more than 2, or no more than 1 nucleotide from the sequence set forth in any one of SEQ ID NOS: 62-125.

[0566] As another example, a guide RNA targeting intron 1 of a human ALB gene can comprise, consist essentially of, or consist of the sequence set forth in any one of SEQ ID NOS: 68, 100, 62, 94, 65, 97, 73, and 105. Alternatively, a guide RNA targeting intron 1 of a human ALB gene can comprise, consist essentially of, or consist of a sequence that is at least 75%, at least 80%, at least 85%, at least 90%, or at least 95% identical to the DNA-targeting segment set forth in any one of SEQ ID NOS: 68, 100, 62, 94, 65, 97, 73, and 105. Alternatively, a guide RNA targeting intron 1 of a human ALB gene can comprise, consist essentially of, or consist of a sequence that is at least 90% or at least 95% identical to the DNA-targeting segment set forth in any one of SEQ ID NOS: 68, 100, 62, 94, 65, 97, 73, and 105. Alternatively, a guide RNA targeting intron 1 of a human ALB gene can comprise, consist essentially of, or consist of a sequence that differs by no more than 3, no more than 2, or no more than 1 nucleotide from the sequence set forth in any one of SEQ ID NOS: 68, 100, 62, 94, 65, 97, 73, and 105.

[0567] As another example, a guide RNA targeting intron 1 of a human ALB gene can comprise, consist essentially of, or consist of the sequence set forth in SEQ ID NO: 68 or 100. Alternatively, a guide RNA targeting intron 1 of a human ALB gene can comprise, consist essentially of, or consist of a sequence that is at least 75%, at least 80%, at least 85%, at least 90%, or at least 95% identical to the DNA-targeting segment set forth in SEQ ID NO: 68 or 100. Alternatively, a guide RNA targeting intron 1 of a human ALB gene can comprise, consist essentially of, or consist of a sequence that is at least 90% or at least 95% identical to the DNA-targeting segment set forth in SEQ ID NO: 68 or 100. Alternatively, a guide RNA targeting intron 1 of a human ALB gene can comprise, consist essentially of, or consist of a sequence that differs by no more than 3, no more than 2, or no more than 1 nucleotide from the sequence set forth in SEQ ID NO: 68 or 100.

[0568] As another example, a guide RNA targeting intron 1 of a human ALB gene can comprise, consist essentially of, or consist of the sequence set forth in SEQ ID NO: 62 or 94. Alternatively, a guide RNA targeting intron 1 of a human ALB gene can comprise, consist essentially of, or consist of a sequence that is at least 75%, at least 80%, at least 85%, at least 90%, or at least 95% identical to the DNA-targeting segment set forth in SEQ ID NO: 62 or 94. Alternatively, a guide RNA targeting intron 1 of a human ALB gene can comprise, consist essentially of, or consist of a sequence that is at least 90% or at least 95% identical to the DNA-targeting segment set forth in SEQ ID NO: 62 or 94. Alternatively, a guide RNA targeting intron 1 of a human ALB gene can comprise, consist essentially of, or consist of a sequence that differs by no more than 3, no more than 2, or no more than 1 nucleotide from the sequence set forth in SEQ ID NO: 62 or 94.

[0569] As another example, a guide RNA targeting intron 1 of a human ALB gene can comprise, consist essentially of, or consist of the sequence set forth in SEQ ID NO: 65 or 97. Alternatively, a guide RNA targeting intron 1 of a human ALB gene can comprise, consist essentially of, or consist of a sequence that is at least 75%, at least 80%, at least 85%, at least 90%, or at least 95% identical to the DNA-targeting segment set forth in SEQ ID NO: 65 or 97. Alternatively, a guide RNA targeting intron 1 of a human ALB gene can comprise, consist essentially of, or consist of a sequence that is at least 90% or at least 95% identical to the DNA-targeting segment set forth in SEQ ID NO: 65 or 97. Alternatively, a guide RNA targeting intron 1 of a human ALB gene can comprise, consist essentially of, or consist of a sequence that differs by no more than 3, no more than 2, or no more than 1 nucleotide from the sequence set forth in SEQ ID NO: 65 or 97.

[0570] As another example, a guide RNA targeting intron 1 of a human ALB gene can comprise, consist essentially of, or consist of the sequence set forth in SEQ ID NO: 73 or 105. Alternatively, a guide RNA targeting intron 1 of a human ALB gene can comprise, consist essentially of, or consist of a sequence that is at least 75%, at least 80%, at least 85%, at least 90%, or at least 95% identical to the DNA-targeting segment set forth in SEQ ID NO: 73 or 105. Alternatively, a guide RNA targeting intron 1 of a human ALB gene can comprise, consist essentially of, or consist of a sequence that is at least 90% or at least 95% identical to the DNA-targeting segment set forth in SEQ ID NO: 73 or 105. Alternatively, a guide RNA targeting intron 1 of a human ALB gene can comprise, consist essentially of, or consist of a sequence that differs by no more than 3, no more than 2, or no more than 1 nucleotide from the sequence set forth in SEQ ID NO: 73 or 105.

### Guide RNA Target Sequences

[0571] Target DNAs for guide RNAs include nucleic acid sequences present in a DNA to which a DNA-targeting segment of a gRNA will bind, provided sufficient conditions for binding exist. Suitable DNA/RNA binding conditions include physiological conditions normally present in a cell. Other suitable DNA/RNA binding conditions (e.g., conditions in a cell-free system) are known in the art (see, e.g., Molecular Cloning: A Laboratory Manual, 3rd Ed. (Sambrook et al., Harbor Laboratory Press 2001), herein incorporated by reference in its entirety for all purposes). The strand of the target DNA that is complementary to and hybridizes with the gRNA can be called the “complementary strand,” and the strand of the target DNA that is complementary to the “complementary strand” (and is therefore not complementary to the Cas protein or gRNA) can be called “noncomplementary strand” or “template strand.”

[0572] The target DNA includes both the sequence on the complementary strand to which the guide RNA hybridizes and the corresponding sequence on the non-complementary strand (e.g., adj acent to the protospacer adjacent motif (PAM)). The term “guide RNA target sequence” as used herein refers specifically to the sequence on the non-complementary strand corresponding to (i.e., the reverse complement of) the sequence to which the guide RNA hybridizes on the complementary strand. That is, the guide RNA target sequence refers to the sequence on the non-complementary strand adjacent to the PAM (e.g., upstream or 5′ of the PAM in the case of Cas9). A guide RNA target sequence is equivalent to the DNA-targeting segment of a guide RNA, but with thymines instead of uracils. As one example, a guide RNA target sequence for an SpCas9 enzyme can refer to the sequence upstream of the 5′-NGG-3′ PAM on the non-complementary strand. A guide RNA is designed to have complementarity to the complementary strand of a target DNA, where hybridization between the DNA-targeting segment of the guide RNA and the complementary strand of the target DNA promotes the formation of a CRISPR complex. Full complementarity is not necessarily required, provided that there is sufficient complementarity to cause hybridization and promote formation of a CRISPR complex. If a guide RNA is referred to herein as targeting a guide RNA target sequence, what is meant is that the guide RNA hybridizes to the complementary strand sequence of the target DNA that is the reverse complement of the guide RNA target sequence on the non-complementary strand.

[0573] A target DNA or guide RNA target sequence can comprise any polynucleotide, and can be located, for example, in the nucleus or cytoplasm of a cell or within an organelle of a cell, such as a mitochondrion or chloroplast. A target DNA or guide RNA target sequence can be any nucleic acid sequence endogenous or exogenous to a cell. The guide RNA target sequence can be a sequence coding a gene product (e.g., a protein) or a non-coding sequence (e.g., a regulatory sequence) or can include both.

[0574] Site-specific binding and cleavage of a target DNA by a Cas protein can occur at locations determined by both (i) base-pairing complementarity between the guide RNA and the complementary strand of the target DNA and (ii) a short motif, called the protospacer adjacent motif (PAM), in the non-complementary strand of the target DNA. The PAM can flank the guide RNA target sequence. Optionally, the guide RNA target sequence can be flanked on the 3′ end by the PAM (e.g., for Cas9). Alternatively, the guide RNA target sequence can be flanked on the 5′ end by the PAM (e.g., for Cpf1). For example, the cleavage site of Cas proteins can be about 1 to about 10 or about 2 to about 5 base pairs (e.g., 3 base pairs) upstream or downstream of the PAM sequence (e.g., within the guide RNA target sequence). In the case of SpCas9, the PAM sequence (i.e., on the non-complementary strand) can be 5′-N₁GG-3′, where N₁ is any DNA nucleotide, and where the PAM is immediately 3′ of the guide RNA target sequence on the non-complementary strand of the target DNA. As such, the sequence corresponding to the PAM on the complementary strand (i.e., the reverse complement) would be 5′-CCN₂-3′, where N₂ is any DNA nucleotide and is immediately 5′ of the sequence to which the DNA-targeting segment of the guide RNA hybridizes on the complementary strand of the target DNA. In some such cases, N₁ and N₂ can be complementary and the N₁- N₂ base pair can be any base pair (e.g., N₁=C and N₂=G; N₁=G and N₂=C; N₁=A and N₂=T; or N₁=T, and N₂=A). In the case of Cas9 from S. aureus, the PAM can be NNGRRT or NNGRR, where N can A, G, C, or T, and R can be G or A. In the case of Cas9 from C. jejuni, the PAM can be, for example, NNNNACAC or NNNNRYAC, where N can be A, G, C, or T, and R can be G or A. In some cases (e.g., for FnCpf1), the PAM sequence can be upstream of the 5′ end and have the sequence 5′-TTN-3′. In the case of DpbCasX, the PAM can have the sequence 5′-TTCN-3′. In the case of CasΦ, the PAM can have the sequence 5′-TBN-3′, wherein B is G, T, or C.

[0575] An example of a guide RNA target sequence is a 20-nucleotide DNA sequence immediately preceding an NGG motif recognized by an SpCas9 protein. For example, two examples of guide RNA target sequences plus PAMs are GN₁₉NGG (SEQ ID NO: 5) or N₂₀NGG (SEQ ID NO: 6). See, e.g., WO 2014/165825, herein incorporated by reference in its entirety for all purposes. The guanine at the 5′ end can facilitate transcription by RNA polymerase in cells. Other examples of guide RNA target sequences plus PAMs can include two guanine nucleotides at the 5′ end (e.g., GGN₂₀NGG; SEQ ID NO: 7) to facilitate efficient transcription by T7 polymerase in vitro. See, e.g., WO 2014/065596, herein incorporated by reference in its entirety for all purposes. Other guide RNA target sequences plus PAMs can have between 4-22 nucleotides in length of SEQ ID NOS: 5-7, including the 5′ G or GG and the 3′ GG or NGG. Yet other guide RNA target sequences plus PAMs can have between 14 and 20 nucleotides in length of SEQ ID NOS: 5-7.

[0576] Formation of a CRISPR complex hybridized to a target DNA can result in cleavage of one or both strands of the target DNA within or near the region corresponding to the guide RNA target sequence (i.e., the guide RNA target sequence on the non-complementary strand of the target DNA and the reverse complement on the complementary strand to which the guide RNA hybridizes). For example, the cleavage site can be within the guide RNA target sequence (e.g., at a defined location relative to the PAM sequence). The “cleavage site” includes the position of a target DNA at which a Cas protein produces a single-strand break or a double-strand break. The cleavage site can be on only one strand (e.g., when a nickase is used) or on both strands of a double-stranded DNA. Cleavage sites can be at the same position on both strands (producing blunt ends; e.g. Cas9)) or can be at different sites on each strand (producing staggered ends (i.e., overhangs); e.g., Cpf1). Staggered ends can be produced, for example, by using two Cas proteins, each of which produces a single-strand break at a different cleavage site on a different strand, thereby producing a double-strand break. For example, a first nickase can create a single-strand break on the first strand of double-stranded DNA (dsDNA), and a second nickase can create a single-strand break on the second strand of dsDNA such that overhanging sequences are created. In some cases, the guide RNA target sequence or cleavage site of the nickase on the first strand is separated from the guide RNA target sequence or cleavage site of the nickase on the second strand by at least 2, 3, 4, 5, 6, 7, 8, 9, 10, 15, 20, 25, 30, 40, 50, 75, 100, 250, 500, or 1,000 base pairs.

[0577] The guide RNA target sequence can also be selected to minimize off-target modification or avoid off-target effects (e.g., by avoiding two or fewer mismatches to off-target genomic sequences).

[0578] As one example, a guide RNA targeting intron 1 of a human ALB gene can target the guide RNA target sequence set forth in any one of SEQ ID NOS: 126-157. As another example, a guide RNA targeting intron 1 of a human ALB gene can target at least 17, at least 18, at least 19, or at least 20 contiguous nucleotides of the guide RNA target sequence set forth in any one of SEQ ID NOS: 126-157.

[0579] As another example, a guide RNA targeting intron 1 of a human ALB gene can target the guide RNA target sequence set forth in any one of SEQ ID NOS: 132, 126, 129, and 137. As another example, a guide RNA targeting intron 1 of a human ALB gene can target at least 17, at least 18, at least 19, or at least 20 contiguous nucleotides of the guide RNA target sequence set forth in any one of SEQ ID NOS: 132, 126, 129, and 137.

[0580] As another example, a guide RNA targeting intron 1 of a human ALB gene can target the guide RNA target sequence set forth in SEQ ID NO: 132. As another example, a guide RNA targeting intron 1 of a human ALB gene can target at least 17, at least 18, at least 19, or at least 20 contiguous nucleotides of the guide RNA target sequence set forth in SEQ ID NO: 132.

[0581] As another example, a guide RNA targeting intron 1 of a human ALB gene can target the guide RNA target sequence set forth in SEQ ID NO: 126. As another example, a guide RNA targeting intron 1 of a human ALB gene can target at least 17, at least 18, at least 19, or at least 20 contiguous nucleotides of the guide RNA target sequence set forth in SEQ ID NO: 126.

[0582] As another example, a guide RNA targeting intron 1 of a human ALB gene can target the guide RNA target sequence set forth in SEQ ID NO: 129. As another example, a guide RNA targeting intron 1 of a human ALB gene can target at least 17, at least 18, at least 19, or at least 20 contiguous nucleotides of the guide RNA target sequence set forth in SEQ ID NO: 129.

[0583] As another example, a guide RNA targeting intron 1 of a human ALB gene can target the guide RNA target sequence set forth in SEQ ID NO: 137. As another example, a guide RNA targeting intron 1 of a human ALB gene can target at least 17, at least 18, at least 19, or at least 20 contiguous nucleotides of the guide RNA target sequence set forth in SEQ ID NO: 137.

TABLE 6

Human ALB Intron 1 Guide RNA Target Sequences.

| Guide RNA Target Sequence | SEQ ID NO: |
|---|---|
| GAGCAACCTCACTCTTGTCT | 126 |
| ATGCATTTGTTTCAAAATAT | 127 |
| TGCATTTGTTTCAAAATATT | 128 |
| ATTTATGAGATCAACAGCAC | 129 |
| GATCAACAGCACAGGTTTTG | 130 |
| TTAAATAAAGCATAGTGCAA | 131 |
| TAAAGCATAGTGCAATGGAT | 132 |
| TAGTGCAATGGATAGGTCTT | 133 |
| TACTAAAACTTTATTTTACT | 134 |
| AAAGTTGAACAATAGAAAAA | 135 |
| AATGCATAATCTAAGTCAAA | 136 |
| TAATAAAATTCAAACATCCT | 137 |
| GCATCTTTAAAGAATTATTT | 138 |
| TTTGGCATTTATTTCTAAAA | 139 |
| TGTATTTGTGAAGTCTTACA | 140 |
| TCCTAGGTAAAAAAAAAAAA | 141 |
| TAATTTTCTTTTGCGCACTA | 142 |
| TGACTGAAACTTCACAGAAT | 143 |
| GACTGAAACTTCACAGAATA | 144 |
| TTCATTTTAGTCTGTCTTCT | 145 |
| ATTATCTAAGTTTGAATATA | 146 |
| AATTTTTAAAATAGTATTCT | 147 |
| TGAATTATTCTTCTGTTTAA | 148 |
| ATCATCCTGAGTTTTTCTGT | 149 |
| TTACTAAAACTTTATTTTAC | 150 |
| ACCTTTTTTTTTTTTTACCT | 151 |
| AGTGCAATGGATAGGTCTTT | 152 |
| TGATTCCTACAGAAAAACTC | 153 |
| TGGGCAAGGGAAGAAAAAAA | 154 |
| CCTCACTCTTGTCTGGGCAA | 155 |
| ACCTCACTCTTGTCTGGGCA | 156 |
| TGAGCAACCTCACTCTTGTC | 157 |

TABLE 7

Mouse Alb Intron 1 Guide RNA Target Sequences.

| Guide RNA Target Sequence | SEQ ID NO: |
|---|---|
| CACTCTTGTCTGTGGAAACA | 165 |

### Lipid Nanoparticles Comprising Nuclease Agents

[0584] Lipid nanoparticles comprising the nuclease agents (e.g., CRISPR/Cas systems) are also provided. The lipid nanoparticles can alternatively or additionally comprise a nucleic acid construct encoding a polypeptide of interest (e.g., multidomain therapeutic protein) as disclosed herein. For example, the lipid nanoparticles can comprise a nuclease agent (e.g., CRISPR/Cas system), can comprise a nucleic acid construct encoding a polypeptide of interest (e.g., multidomain therapeutic protein), or can comprise both a nuclease agent (e.g., a CRISPR/Cas system) and a nucleic acid construct encoding a polypeptide of interest (e.g., multidomain therapeutic protein). Regarding CRISPR/Cas systems, the lipid nanoparticles can comprise the Cas protein in any form (e.g., protein, DNA, or mRNA) and/or can comprise the guide RNA(s) in any form (e.g., DNA or RNA). In one example, the lipid nanoparticles comprise the Cas protein in the form of mRNA (e.g., a modified RNA as described herein) and the guide RNA(s) in the form of RNA (e.g., a modified guide RNA as disclosed herein). As another example, the lipid nanoparticles can comprise the Cas protein in the form of protein and the guide RNA(s) in the form of RNA). In a specific example, the guide RNA and the Cas protein are each introduced in the form of RNA via LNP-mediated delivery in the same LNP. As discussed in more detail elsewhere herein, one or more of the RNAs can be modified. For example, guide RNAs can be modified to comprise one or more stabilizing end modifications at the 5′ end and/or the 3′ end. Such modifications can include, for example, one or more phosphorothioate linkages at the 5′ end and/or the 3′ end and/or one or more 2′-O-methyl modifications at the 5′ end and/or the 3′ end. As another example, Cas mRNA modifications can include substitution with pseudouridine (e.g., fully substituted with pseudouridine), 5′ caps, and polyadenylation. As another example, Cas mRNA modifications can include substitution with N1-methyl-pseudouridine (e.g., fully substituted with N1-methyl-pseudouridine), 5′ caps, and polyadenylation. Other modifications are also contemplated as disclosed elsewhere herein. Delivery through such methods can result in transient Cas expression and/or transient presence of the guide RNA, and the biodegradable lipids improve clearance, improve tolerability, and decrease immunogenicity. Lipid formulations can protect biological molecules from degradation while improving their cellular uptake. Lipid nanoparticles are particles comprising a plurality of lipid molecules physically associated with each other by intermolecular forces. These include microspheres (including unilamellar and multilamellar vesicles, e.g., liposomes), a dispersed phase in an emulsion, micelles, or an internal phase in a suspension. Such lipid nanoparticles can be used to encapsulate one or more nucleic acids or proteins for delivery. Formulations which contain cationic lipids are useful for delivering polyanions such as nucleic acids. Other lipids that can be included are neutral lipids (i.e., uncharged or zwitterionic lipids), anionic lipids, helper lipids that enhance transfection, and stealth lipids that increase the length of time for which nanoparticles can exist in vivo. Examples of suitable cationic lipids, neutral lipids, anionic lipids, helper lipids, and stealth lipids can be found in WO 2016/010840 A1 and WO 2017/173054 A1, each of which is herein incorporated by reference in its entirety for all purposes. An exemplary lipid nanoparticle can comprise a cationic lipid and one or more other components. In one example, the other component can comprise a helper lipid such as cholesterol. In another example, the other components can comprise a helper lipid such as cholesterol and a neutral lipid such as distearoylphosphatidylcholine or 1,2-distearoyl-sn-glycero-3-phosphocholine (DSPC). In another example, the other components can comprise a helper lipid such as cholesterol, an optional neutral lipid such as DSPC, and a stealth lipid such as S010, S024, S027, S031, or S033.

[0585] The LNP may contain one or more or all of the following: (i) a lipid for encapsulation and for endosomal escape; (ii) a neutral lipid for stabilization; (iii) a helper lipid for stabilization; and (iv) a stealth lipid. See, e.g., Finn et al. (2018) Cell Rep. 22(9):2227-2235 and WO 2017/173054 A1, each of which is herein incorporated by reference in its entirety for all purposes. In certain LNPs, the cargo can include a guide RNA or a nucleic acid encoding a guide RNA. In certain LNPs, the cargo can include an mRNA encoding a Cas nuclease, such as Cas9, and a guide RNA or a nucleic acid encoding a guide RNA. In certain LNPs, the cargo can include a nucleic acid construct encoding a polypeptide of interest (e.g., multidomain therapeutic protein) as described elsewhere herein. In certain LNPs, the cargo can include an mRNA encoding a Cas nuclease, such as Cas9, a guide RNA or a nucleic acid encoding a guide RNA, and a nucleic acid construct encoding a polypeptide of interest (e.g., multidomain therapeutic protein). In some LNPs, the lipid component comprises an amine lipid such as a biodegradable, ionizable lipid. In some instances, the lipid component comprises biodegradable, ionizable lipid, cholesterol, DSPC, and PEG-DMG. For example, Cas9 mRNA and gRNA can be delivered to cells and animals utilizing lipid formulations comprising ionizable lipid ((9Z,12Z)-3-((4,4-bis(octyloxy)butanoyl)oxy)-2-((((3-(diethylamino)propoxy)carbonyl)oxy)methyl)propyl octadeca-9,12-dienoate, also called 3-((4,4-bis(octyloxy)butanoyl)oxy)-2-((((3-(diethylamino)propoxy)carbonyl)oxy)methyl)propyl (9Z, 12Z)-octadeca-9,12-dienoate), cholesterol, DSPC, and PEG2k-DMG.

[0586] In some examples, the LNPs comprise cationic lipids. In some examples, the LNPs comprise (9Z,12Z)-3-((4,4-bis(octyloxy)butanoyl)oxy)-2-((((3-(diethylamino)propoxy)carbonyl)oxy)methyl)propyl octadeca-9,12-dienoate, also called 3-((4,4-bis(octyloxy)butanoyl)oxy)-2-((((3-(diethylamino)propoxy)carbonyl)oxy)methyl)propyl (9Z,12Z)-octadeca-9,12-dienoate) or another ionizable lipid. See, e.g., WO 2019/067992, WO 2017/173054, WO 2015/095340, and WO 2014/136086, each of which is herein incorporated by reference in its entirety for all purposes. In some examples, the LNPs comprise molar ratios of a cationic lipid amine to RNA phosphate (N:P) of about 4.5, about 5.0, about 5.5, about 6.0, or about 6.5. In some examples, the terms cationic and ionizable in the context of LNP lipids are interchangeable (e.g., wherein ionizable lipids are cationic depending on the pH).

[0587] The lipid for encapsulation and endosomal escape can be a cationic lipid. The lipid can also be a biodegradable lipid, such as a biodegradable ionizable lipid. One example of a suitable lipid is Lipid A or LP01, which is (9Z,12Z)-3-((4,4-bis(octyloxy)butanoyl)oxy)-2-((((3-(diethylamino)propoxy)carbonyl)oxy)methyl)propyl octadeca-9,12-dienoate, also called 3-((4,4-bis(octyloxy)butanoyl)oxy)-2-((((3-(diethylamino)propoxy)carbonyl)oxy)methyl)propyl (9Z,12Z)-octadeca-9,12-dienoate. See, e.g., Finn et al. (2018) Cell Rep. 22(9):2227-2235 and WO 2017/173054 A1, each of which is herein incorporated by reference in its entirety for all purposes. Another example of a suitable lipid is Lipid B, which is ((5-((dimethylamino)methyl)-1,3-phenylene)bis(oxy))bis(octane-8,1-diyl)bis(decanoate), also called ((5-((dimethylamino)methyl)-1,3-phenylene)bis(oxy))bis(octane-8,1-diyl)bis(decanoate). Another example of a suitable lipid is Lipid C, which is 2-((4-(((3-(dimethylamino)propoxy)carbonyl)oxy)hexadecanoyl)oxy)propane-1,3-diyl(9Z,9′Z,12Z,12′Z)-bis(octadeca-9,12-dienoate). Another example of a suitable lipid is Lipid D, which is 3-(((3-(dimethylamino)propoxy)carbonyl)oxy)-13-(octanoyloxy)tridecyl 3-octylundecanoate. Other suitable lipids include heptatriaconta-6,9,28,31-tetraen-19-yl 4-(dimethylamino)butanoate (also known as [(6Z,9Z,28Z,31Z)-heptatriaconta-6,9,28,31-tetraen-19-yl] 4-(dimethylamino)butanoate or Dlin-MC3-DMA (MC3))).

[0588] Some such lipids suitable for use in the LNPs described herein are biodegradable in vivo.

[0589] Such lipids may be ionizable depending upon the pH of the medium they are in. For example, in a slightly acidic medium, the lipids may be protonated and thus bear a positive charge. Conversely, in a slightly basic medium, such as, for example, blood where pH is approximately 7.35, the lipids may not be protonated and thus bear no charge. In some embodiments, the lipids may be protonated at a pH of at least about 9, 9.5, or 10. The ability of such a lipid to bear a charge is related to its intrinsic pKa. For example, the lipid may, independently, have a pKa in the range of from about 5.8 to about 6.2.

[0590] Neutral lipids function to stabilize and improve processing of the LNPs. Examples of suitable neutral lipids include a variety of neutral, uncharged or zwitterionic lipids. Examples of neutral phospholipids suitable for use in the present disclosure include, but are not limited to, 5-heptadecylbenzene-1,3-diol (resorcinol), dipalmitoylphosphatidylcholine (DPPC), distearoylphosphatidylcholine or 1,2-distearoyl-sn-glycero-3-phosphocholine (DSPC), phosphocholine (DOPC), dimyristoylphosphatidylcholine (DMPC), phosphatidylcholine (PLPC), 1,2-diarachidonoyl-sn-glycero-3-phosphocholine (DAPC), phosphatidylethanolamine (PE), egg phosphatidylcholine (EPC), dilauryloylphosphatidylcholine (DLPC), dimyristoylphosphatidylcholine (DMPC), 1-myristoyl-2-palmitoyl phosphatidylcholine (MPPC), 1-palmitoyl-2-myristoyl phosphatidylcholine (PMPC), 1-palmitoyl-2-stearoyl phosphatidylcholine (PSPC), 1,2-diarachidoyl-sn-glycero-3-phosphocholine (DBPC), 1-stearoyl-2-palmitoyl phosphatidylcholine (SPPC), 1,2-dieicosenoyl-sn-glycero-3-phosphocholine (DEPC), palmitoyloleoyl phosphatidylcholine (POPC), lysophosphatidyl choline, dioleoyl phosphatidylethanolamine (DOPE), dilinoleoylphosphatidylcholine distearoylphosphatidylethanolamine (DSPE), dimyristoyl phosphatidylethanolamine (DMPE), dipalmitoyl phosphatidylethanolamine (DPPE), palmitoyloleoyl phosphatidylethanolamine (POPE), lysophosphatidylethanolamine, 1-stearoyl-2-oleoyl-sn-glycero-3-phosphocholine (SOPC), and combinations thereof. For example, the neutral phospholipid may be selected from the group consisting of distearoylphosphatidylcholine (DSPC) and dimyristoyl phosphatidyl ethanolamine (DMPE).

[0591] Helper lipids include lipids that enhance transfection. The mechanism by which the helper lipid enhances transfection can include enhancing particle stability. In certain cases, the helper lipid can enhance membrane fusogenicity. Helper lipids include steroids, sterols, and alkyl resorcinols. Examples of suitable helper lipids suitable include cholesterol, 5-heptadecylresorcinol, and cholesterol hemisuccinate. In one example, the helper lipid may be cholesterol or cholesterol hemisuccinate.

[0592] Stealth lipids include lipids that alter the length of time the nanoparticles can exist in vivo. Stealth lipids may assist in the formulation process by, for example, reducing particle aggregation and controlling particle size. Stealth lipids may modulate pharmacokinetic properties of the LNP. Suitable stealth lipids include lipids having a hydrophilic head group linked to a lipid moiety.

[0593] The hydrophilic head group of stealth lipid can comprise, for example, a polymer moiety selected from polymers based on PEG (sometimes referred to as poly(ethylene oxide)), poly(oxazoline), poly(vinyl alcohol), poly(glycerol), poly(N- vinylpyrrolidone), polyaminoacids, and poly N-(2-hydroxypropyl)methacrylamide. The term PEG means any polyethylene glycol or other polyalkylene ether polymer. In certain LNP formulations, the PEG, is a PEG-2K, also termed PEG 2000, which has an average molecular weight of about 2,000 daltons. See, e.g., WO 2017/173054 A1, herein incorporated by reference in its entirety for all purposes.

[0594] The lipid moiety of the stealth lipid may be derived, for example, from diacylglycerol or diacylglycamide, including those comprising a dialkylglycerol or dialkylglycamide group having alkyl chain length independently comprising from about C4 to about C40 saturated or unsaturated carbon atoms, wherein the chain may comprise one or more functional groups such as, for example, an amide or ester. The dialkylglycerol or dialkylglycamide group can further comprise one or more substituted alkyl groups.

[0595] As one example, the stealth lipid may be selected from PEG-dilauroylglycerol, PEG-dimyristoylglycerol (PEG-DMG), PEG-dipalmitoylglycerol, PEG-distearoylglycerol (PEG-DSPE), PEG-dilaurylglycamide, PEG- dimyristylglycamide, PEG-dipalmitoylglycamide, and PEG-distearoylglycamide, PEG- cholesterol (1-[8′-(Cholest-5-en-3[beta]-oxy)carboxamido-3′,6′-dioxaoctanyl]carbamoyl-[omega]-methyl-poly(ethylene glycol), PEG-DMB (3,4-ditetradecoxylbenzyl-[omega]-methyl-poly(ethylene glycol)ether), 1,2-dimyristoyl-sn- glycero-3-phosphoethanolamine-N-[methoxy(polyethylene glycol)-2000] (PEG2k- DMPE),or 1,2-dimyristoyl-rac-glycero-3-methylpolyoxyethylene glycol-2000 (PEG2k-DMG), 1,2- distearoyl-sn-glycero-3-phosphoethanolamine-N-[methoxy(polyethylene glycol)-2000] (PEG2k-DSPE), 1,2-distearoyl-sn-glycerol, methoxypoly ethylene glycol (PEG2k-DSG), poly(ethylene glycol)-2000-dimethacrylate (PEG2k-DMA), and 1,2- distearyloxypropyl-3-amine-N-[methoxy(polyethylene glycol)-2000] (PEG2k-DSA). In one particular example, the stealth lipid may be PEG2k-DMG.

[0596] In some embodiments, the PEG lipid includes a glycerol group. In some embodiments, the PEG lipid includes a dimyristoylglycerol (DMG) group. In some embodiments, the PEG lipid comprises PEG2k. In some embodiments, the PEG lipid is a PEG-DMG. In some embodiments, the PEG lipid is a PEG2k-DMG. In some embodiments, the PEG lipid is 1,2-dimyristoyl-rac-glycero-3-methoxypolyethylene glycol-2000. In some embodiments, the PEG2k-DMG is 1,2-dimyristoyl-rac-glycero-3-methoxypolyethylene glycol-2000.

[0597] The LNPs can comprise different respective molar ratios of the component lipids in the formulation. The mol-% of the CCD lipid may be, for example, from about 30 mol-% to about 60 mol-%. The mol-% of the helper lipid may be, for example, from about 30 mol-% to about 60 mol-%. The mol-% of the neutral lipid may be, for example, from about 1 mol-% to about 20 mol-%. The mol-% of the stealth lipid may be, for example, from about 1 mol-% to about 10 mol-%

[0598] The LNPs can have different ratios between the positively charged amine groups of the biodegradable lipid (N) and the negatively charged phosphate groups (P) of the nucleic acid to be encapsulated. This may be mathematically represented by the equation N/P. For example, the N/P ratio may be from about 0.5 to about 100. The N/P ratio can also be from about 4 to about 6.

[0599] In some LNPs, the cargo can comprise Cas mRNA (e.g., Cas9 mRNA) and gRNA. The Cas mRNA and gRNAs can be in different ratios. For example, the LNP formulation can include a ratio of Cas mRNA to gRNA nucleic acid ranging from about 25:1 to about 1:25. Alternatively, the LNP formulation can include a ratio of Cas mRNA to gRNA nucleic acid of from about 2:1 to about 1:2. In specific examples, the ratio of Cas mRNA to gRNA can be about 2:1.

[0600] In some LNPs, the cargo can comprise a nucleic acid construct encoding a polypeptide of interest (e.g., multidomain therapeutic protein) and gRNA. The nucleic acid construct encoding a polypeptide of interest (e.g., multidomain therapeutic protein) and gRNAs can be in different ratios. For example, the LNP formulation can include a ratio of nucleic acid construct to gRNA nucleic acid ranging from about 25:1 to about 1:25.

[0601] A specific example of a suitable LNP has a nitrogen-to-phosphate (N/P) ratio of about 4.5 and contains biodegradable cationic lipid, cholesterol, DSPC, and PEG2k-DMG in an about 45:44:9:2 molar ratio (about 45:about 44:about 9:about 2). The biodegradable cationic lipid can be (9Z,12Z)-3-((4,4-bis(octyloxy)butanoyl)oxy)-2-((((3-(diethylamino)propoxy)carbonyl)oxy)methyl)propyl octadeca-9,12-dienoate, also called 3-((4,4-bis(octyloxy)butanoyl)oxy)-2-((((3-(diethylamino)propoxy)carbonyl)oxy)methyl)propyl (9Z,12Z)-octadeca-9,12-dienoate. See, e.g., Finn et al. (2018) Cell Rep. 22(9):2227-2235, herein incorporated by reference in its entirety for all purposes. The Cas9 mRNA can be in an about 1:1 (about 1:about 1) ratio by weight to the guide RNA. Another specific example of a suitable LNP contains Dlin-MC3-DMA (MC3), cholesterol, DSPC, and PEG-DMG in an about 50:38.5:10:1.5 molar ratio (about 50:about 38.5:about 10:about 1.5). The Cas9 mRNA can be in an about 1:2 ratio (about 1:about 2)by weight to the guide RNA. The Cas9 mRNA can be in an about 1:1 ratio (about 1:about 1) by weight to the guide RNA. The Cas9 mRNA can be in an about 2:1 ratio (about 2:about 1) by weight to the guide RNA.

[0602] Another specific example of a suitable LNP has a nitrogen-to-phosphate (N/P) ratio of about 6 and contains biodegradable cationic lipid, cholesterol, DSPC, and PEG2k-DMG in an about 50:38:9:3 molar ratio (about 50:about 38:about 9:about 3). The biodegradable cationic lipid can be Lipid A ((9Z,12Z)-3-((4,4-bis(octyloxy)butanoyl)oxy)-2-((((3-(diethylamino)propoxy)carbonyl)oxy)methyl)propyl octadeca-9,12-dienoate, also called 3-((4,4-bis(octyloxy)butanoyl)oxy)-2-((((3-(diethylamino)propoxy)carbonyl)oxy)methyl)propyl (9Z,12Z)-octadeca-9,12-dienoate). The Cas9 mRNA can be in an about 1:2 ratio (about 1:about 2) by weight to the guide RNA. The Cas9 mRNA can be in an about 1:1 ratio (about 1:about 1)by weight to the guide RNA. The Cas9 mRNA can be in an about 2:1 (about 2:about 1) ratio by weight to the guide RNA.

[0603] Another specific example of a suitable LNP has a nitrogen-to-phosphate (N/P) ratio of about 3 and contains a cationic lipid, a structural lipid, cholesterol (e.g., cholesterol (ovine) (Avanti 700000)), and PEG2k-DMG (e.g., PEG-DMG 2000 (NOF America-SUNBRIGHT® GM-020(DMG-PEG)) in an about 50:10:38.5:1.5 ratio (about 50:about 10:about 38.5:about 1.5) or an about 47:10:42:1 ratio (about 47:about 10:about 42:about 1). The structural lipid can be, for example, DSPC (e.g., DSPC (Avanti 850365)), SOPC, DOPC, or DOPE. The cationic/ionizable lipid can be, for example, Dlin-MC3-DMA (e.g., Dlin-MC3-DMA (Biofine International)). The Cas9 mRNA can be in an about 1:2 ratio (about 1:about 2) by weight to the guide RNA. The Cas9 mRNA can be in an about 1:1 ratio (about 1:about 1) by weight to the guide RNA. The Cas9 mRNA can be in an about 2:1 ratio (about 2:about 1) by weight to the guide RNA.

[0604] Another specific example of a suitable LNP contains Dlin-MC3-DMA, DSPC, cholesterol, and a PEG lipid in an about 45:9:44:2 ratio (about 45:about 9:about 44:about 2). Another specific example of a suitable LNP contains Dlin-MC3-DMA, DOPE, cholesterol, and PEG lipid or PEG DMG in an about 50:10:39:1 ratio (about 50:about 10:about 39:about 1). Another specific example of a suitable LNP has Dlin-MC3-DMA, DSPC, cholesterol, and PEG2k-DMG at an about 55:10:32.5:2.5 ratio (about 55:about 10:about 32.5:about 2.5). Another specific example of a suitable LNP has Dlin-MC3-DMA, DSPC, cholesterol, and PEG-DMG in an about 50:10:38.5:1.5 ratio (about 50:about 10:about 38.5:about 1.5). Another specific example of a suitable LNP has Dlin-MC3-DMA, DSPC, cholesterol, and PEG-DMG in an about 50:10:38.5:1.5 ratio (about 50:about 10:about 38.5:about 1.5). The Cas9 mRNA can be in an about 1:2 ratio (about 1:about 2) by weight to the guide RNA. The Cas9 mRNA can be in an about 1:1 ratio (about 1:about 1) by weight to the guide RNA. The Cas9 mRNA can be in an about 2:1 ratio (about 2:about 1) by weight to the guide RNA.

[0605] Other examples of suitable LNPs can be found, e.g., in WO 2019/067992, WO 2020/082042, US 2020/0270617, WO 2020/082041, US 2020/0268906, WO 2020/082046 (see, e.g., pp. 85-86), and US 2020/0289628, each of which is herein incorporated by reference in its entirety for all purposes.

### Vectors Comprising Nuclease Agents

[0606] The nuclease agents disclosed herein (e.g., ZFN, TALEN, or CRISPR/Cas) can be provided in a vector for expression. A vector can comprise additional sequences such as, for example, replication origins, promoters, and genes encoding antibiotic resistance.

[0607] Some vectors may be circular. Alternatively, the vector may be linear. The vector can be in the packaged for delivered via a lipid nanoparticle, liposome, non-lipid nanoparticle, or viral capsid. Non-limiting exemplary vectors include plasmids, phagemids, cosmids, artificial chromosomes, minichromosomes, transposons, viral vectors, and expression vectors.

[0608] Introduction of nucleic acids can also be accomplished by virus-mediated delivery, such as AAV-mediated delivery or lentivirus-mediated delivery. The vectors can be, for example, viral vectors such as adeno-associated virus (AAV) vectors. The AAV may be any suitable serotype and may be a single-stranded AAV (ssAAV) or a self-complementary AAV (scAAV). Other exemplary viruses/viral vectors include retroviruses, lentiviruses, adenoviruses, vaccinia viruses, poxviruses, and herpes simplex viruses. The viruses can infect dividing cells, non-dividing cells, or both dividing and non-dividing cells. The viruses can integrate into the host genome or alternatively do not integrate into the host genome. Such viruses can also be engineered to have reduced immunity. The viruses can be replication-competent or can be replication-defective (e.g., defective in one or more genes necessary for additional rounds of virion replication and/or packaging). Viral vector may be genetically modified from their wild type counterparts. For example, the viral vector may comprise an insertion, deletion, or substitution of one or more nucleotides to facilitate cloning or such that one or more properties of the vector is changed. Such properties may include packaging capacity, transduction efficiency, immunogenicity, genome integration, replication, transcription, and translation. In some examples, a portion of the viral genome may be deleted such that the virus is capable of packaging exogenous sequences having a larger size. In some examples, the viral vector may have an enhanced transduction efficiency. In some examples, the immune response induced by the virus in a host may be reduced. In some examples, viral genes (such as integrase) that promote integration of the viral sequence into a host genome may be mutated such that the virus becomes non-integrating. In some examples, the viral vector may be replication defective. In some examples, the viral vector may comprise exogenous transcriptional or translational control sequences to drive expression of coding sequences on the vector. In some examples, the virus may be helper-dependent. For example, the virus may need one or more helper virus to supply viral components (such as viral proteins) required to amplify and package the vectors into viral particles. In such a case, one or more helper components, including one or more vectors encoding the viral components, may be introduced into a host cell or population of host cells along with the vector system described herein. In other examples, the virus may be helper-free. For example, the virus may be capable of amplifying and packaging the vectors without a helper virus. In some examples, the vector system described herein may also encode the viral components required for virus amplification and packaging.

[0609] Exemplary viral titers (e.g., AAV titers) include about 10¹² to about 10¹⁶ vg/mL. Other exemplary viral titers (e.g., AAV titers) include about 10¹² to about 10¹⁶ vg/kg of body weight.

[0610] Adeno-associated viruses (AAVs) are endemic in multiple species including human and non-human primates (NHPs). At least 12 natural serotypes and hundreds of natural variants have been isolated and characterized to date. See, e.g., Li et al. (2020) Nat. Rev. Genet. 21:255-272, herein incorporated by reference in its entirety for all purposes. AAV particles are naturally composed of a non-enveloped icosahedral protein capsid containing a single-stranded DNA (ssDNA) genome. The DNA genome is flanked by two inverted terminal repeats (ITRs) which serve as the viral origins of replication and packaging signals. The rep gene encodes four proteins required for viral replication and packaging whilst the cap gene encodes the three structural capsid subunits which dictate the AAV serotype, and the Assembly Activating Protein (AAP) which promotes virion assembly in some serotypes.

[0611] Recombinant AAV (rAAV) is currently one of the most commonly used viral vectors used in gene therapy to treat human diseases by delivering therapeutic transgenes to target cells in vivo. Indeed, rAAV vectors are composed of icosahedral capsids similar to natural AAVs, but rAAV virions do not encapsidate AAV protein-coding or AAV replicating sequences. These viral vectors are non-replicating. The only viral sequences required in rAAV vectors are the two ITRs, which are needed to guide genome replication and packaging during manufacturing of the rAAV vector. rAAV genomes are devoid of AAV rep and cap genes, rendering them non-replicating in vivo. rAAV vectors are produced by expressing rep and cap genes along with additional viral helper proteins in trans, in combination with the intended transgene cassette flanked by AAV ITRs.

[0612] In therapeutic rAAV genomes, a gene expression cassette is placed between ITR sequences. Typically, rAAV genome cassettes comprise of a promoter to drive expression of a therapeutic transgene, followed by polyadenylation sequence. The ITRs flanking a rAAV expression cassette are usually derived from AAV2, the first serotype to be isolated and converted into a recombinant viral vector. Since then, most rAAV production methods rely on AAV2 Rep-based packaging systems. See, e.g., Colella et al. (2017) Mol. Ther. Methods Clin. Dev. 8:87-104, herein incorporated by reference in its entirety for all purposes.

[0613] Some non-limiting examples of ITRs that can be used include ITRs comprising, consisting essentially of, or consisting of SEQ ID NO: 158, SEQ ID NO: 159, or SEQ ID NO: 160. Other examples of ITRs comprise one or more mutations compared to SEQ ID NO: 158, SEQ ID NO: 159, or SEQ ID NO: 160 and can be at least 90%, at least 91%, at least 92%, at least 93%, at least 94%, at least 95%, at least 96%, at least 97%, at least 98%, or at least 99% identical to SEQ ID NO: 158, SEQ ID NO: 159, or SEQ ID NO: 160. In some rAAV genomes disclosed herein, the nucleic acid encoding the nuclease agent (or component thereof) is flanked on both sides by the same ITR (i.e., the ITR on the 5′ end, and the reverse complement of the ITR on the 3′ end, such as SEQ ID NO: 158 on the 5′ end and SEQ ID NO: 168 on the 3′ end, or SEQ ID NO: 159 on the 5′ end and SEQ ID NO: 710 on the 3′ end, or SEQ ID NO: 160 on the 5′ end and SEQ ID NO: 711 on the 3′ end). In one example, the ITR on each end can comprise, consist essentially of, or consist of SEQ ID NO: 158 (i.e., SEQ ID NO: 158 on the 5′ end, and the reverse complement on the 3′ end). In another example, the ITR on each end can comprise, consist essentially of, or consist of SEQ ID NO: 159 (i.e., SEQ ID NO: 159 on the 5′ end, and the reverse complement on the 3′ end). In one example, the ITR on at least one end comprises, consists essentially of, or consists of SEQ ID NO: 160. In one example, the ITR on the 5′ end comprises, consists essentially of, or consists of SEQ ID NO: 160. In one example, the ITR on the 3′ end comprises, consists essentially of, or consists of SEQ ID NO: 160. In one example, the ITR on each end can comprise, consist essentially of, or consist of SEQ ID NO: 160 (i.e., SEQ ID NO: 160 on the 5′ end, and the reverse complement on the 3′ end). In one example, the ITR on each end can comprise, consist essentially of, or consist of SEQ ID NO: 160. In other rAAV genomes disclosed herein, the nucleic acid encoding the nuclease agent (or component thereof) is flanked by different ITRs on each end. In one example, the ITR on one end comprises, consists essentially of, or consists of SEQ ID NO: 158, and the ITR on the other end comprises, consists essentially of, or consists of SEQ ID NO: 159. In another example, the ITR on one end comprises, consists essentially of, or consists of SEQ ID NO: 158, and the ITR on the other end comprises, consists essentially of, or consists of SEQ ID NO: 160. In one example, the ITR on one end comprises, consists essentially of, or consists of SEQ ID NO: 159, and the ITR on the other end comprises, consists essentially of, or consists of SEQ ID NO: 160.

[0614] The specific serotype of a recombinant AAV vector influences its in vivo tropism to specific tissues. AAV capsid proteins are responsible for mediating attachment and entry into target cells, followed by endosomal escape and trafficking to the nucleus. Thus, the choice of serotype when developing a rAAV vector will influence what cell types and tissues the vector is most likely to bind to and transduce when injected in vivo. Several serotypes of rAAVs, including rAAV8, are capable of transducing the liver when delivered systemically in mice, NHPs and humans. See, e.g., Li et al. (2020) Nat. Rev. Genet. 21:255-272, herein incorporated by reference in its entirety for all purposes.

[0615] Once in the nucleus, the ssDNA genome is released from the virion and a complementary DNA strand is synthesized to generate a double-stranded DNA (dsDNA) molecule. Double-stranded AAV genomes naturally circularize via their ITRs and become episomes which will persist extrachromosomally in the nucleus. Therefore, for episomal gene therapy programs, rAAV-delivered rAAV episomes provide long-term, promoter-driven gene expression in non-dividing cells. However, this rAAV-delivered episomal DNA is diluted out as cells divide. In contrast, the gene therapy described herein is based on gene insertion to allow long-term gene expression.

[0616] When specific rAAVs comprising specific sequences (e.g., specific bidirectional construct sequences or specific unidirectional construct sequences) are disclosed herein, they are meant to encompass the sequence disclosed or the reverse complement of the sequence. For example, if a bidirectional or unidirectional construct disclosed herein consists of the hypothetical sequence 5′-CTGGACCGA-3′, it is also meant to encompass the reverse complement of that sequence (5′-TCGGTCCAG-3′). Likewise, when rAAVs comprising bidirectional or unidirectional construct elements in a specific 5′ to 3′ order are disclosed herein, they are also meant to encompass the reverse complement of the order of those elements. For example, if an rAAV is disclosed herein that comprises a bidirectional construct that comprises from 5′ to 3′ a first splice acceptor, a first coding sequence, a first terminator, a reverse complement of a second terminator, a reverse complement of a second coding sequence, and a reverse complement of a second splice acceptor, it is also meant to encompass a construct comprising from 5′ to 3′ the second splice acceptor, the second coding sequence, the second terminator, a reverse complement of the first terminator, a reverse complement of the first coding sequence, and a reverse complement of the first splice acceptor. Single-stranded AAV genomes are packaged as either sense (plus-stranded) or anti-sense (minus-stranded genomes), and single-stranded AAV genomes of + and - polarity are packaged with equal frequency into mature rAAV virions. See, e.g., LING et al. (2015) J. Mol. Genet. Med. 9(3):175, Zhou et al. (2008) Mol. Ther. 16(3):494-499, and Samulski et al. (1987) J. Virol. 61:3096-3101, each of which is herein incorporated by reference in its entirety for all purposes.

[0617] The ssDNA AAV genome consists of two open reading frames, Rep and Cap, flanked by two inverted terminal repeats that allow for synthesis of the complementary DNA strand. When constructing an AAV transfer plasmid, the transgene is placed between the two ITRs, and Rep and Cap can be supplied in trans. In addition to Rep and Cap, AAV can require a helper plasmid containing genes from adenovirus. These genes (E4, E2a, and VA) mediate AAV replication. For example, the transfer plasmid, Rep/Cap, and the helper plasmid can be transfected into HEK293 cells containing the adenovirus gene E1+ to produce infectious AAV particles. Alternatively, the Rep, Cap, and adenovirus helper genes may be combined into a single plasmid. Similar packaging cells and methods can be used for other viruses, such as retroviruses.

[0618] Multiple serotypes of AAV have been identified. These serotypes differ in the types of cells they infect (i.e., their tropism), allowing preferential transduction of specific cell types. The term AAV includes, for example, AAV1, AAV2, AAV3, AAV3B, AAV4, AAV5, AAV6, AAV6.2, AAV7, AAVrh.64R1, AAVhu.37, AAVrh.8, AAVrh.32.33, AAV8, AAV9, AAV-DJ, AAV2/8, AAVrh10, AAVLK03, AV10, AAV11, AAV12, rh10, and hybrids thereof, avian AAV, bovine AAV, canine AAV, equine AAV, primate AAV, non-primate AAV, and ovine AAV. The genomic sequences of various serotypes of AAV, as well as the sequences of the native terminal repeats (TRs), Rep proteins, and capsid subunits are known in the art. Such sequences may be found in the literature or in public databases such as GenBank. A “AAV vector” as used herein refers to an AAV vector comprising a heterologous sequence not of AAV origin (i.e., a nucleic acid sequence heterologous to AAV), typically comprising a sequence encoding an exogenous polypeptide of interest. The construct may comprise an AAV1, AAV2, AAV3, AAV3B, AAV4, AAV5, AAV6, AAV6.2, AAV7, AAVrh.64R1, AAVhu.37, AAVrh.8, AAVrh.32.33, AAV8, AAV9, AAV-DJ, AAV2/8, AAVrh10, AAVLK03, AV10, AAV11, AAV12, rh10, and hybrids thereof, avian AAV, bovine AAV, canine AAV, equine AAV, primate AAV, non-primate AAV, and ovine AAV capsid sequence. In general, the heterologous nucleic acid sequence (the transgene) is flanked by at least one, and generally by two, AAV inverted terminal repeat sequences (ITRs). An AAV vector may either be single-stranded (ssAAV) or self-complementary (scAAV). Examples of serotypes for liver tissue include AAV3B, AAV5, AAV6, AAV7, AAV8, AAV9, AAVrh.74, and AAVhu.37, and particularly AAV8. In a specific example, the AAV vector comprising the nucleic acid construct can be recombinant AAV8 (rAAV8). A rAAV8 vector as described herein is one in which the capsid is from AAV8. For example, an AAV vector using ITRs from AAV2 and a capsid of AAV8 is considered herein to be a rAAV8 vector.

[0619] Tropism can be further refined through pseudotyping, which is the mixing of a capsid and a genome from different viral serotypes. For example AAV⅖ indicates a virus containing the genome of serotype 2 packaged in the capsid from serotype 5. Use of pseudotyped viruses can improve transduction efficiency, as well as alter tropism. Hybrid capsids derived from different serotypes can also be used to alter viral tropism. For example, AAV-DJ contains a hybrid capsid from eight serotypes and displays high infectivity across a broad range of cell types in vivo. AAV-DJ8 is another example that displays the properties of AAV-DJ but with enhanced brain uptake. AAV serotypes can also be modified through mutations. Examples of mutational modifications of AAV2 include Y444F, Y500F, Y730F, and S662V. Examples of mutational modifications of AAV3 include Y705F, Y731F, and T492V. Examples of mutational modifications of AAV6 include S663V and T492V. Other pseudotyped/modified AAV variants include AAV2/1, AAV2/6, AAV2/7, AAV2/8, AAV2/9, AAV2.5, AAV8.2, and AAV/SASTG.

[0620] To accelerate transgene expression, self-complementary AAV (scAAV) variants can be used. Because AAV depends on the cell’s DNA replication machinery to synthesize the complementary strand of the AAV’s single-stranded DNA genome, transgene expression may be delayed. To address this delay, scAAV containing complementary sequences that are capable of spontaneously annealing upon infection can be used, eliminating the requirement for host cell DNA synthesis. However, single-stranded AAV (ssAAV) vectors can also be used.

[0621] To increase packaging capacity, longer transgenes may be split between two AAV transfer plasmids, the first with a 3′ splice donor and the second with a 5′ splice acceptor. Upon co-infection of a cell, these viruses form concatemers, are spliced together, and the full-length transgene can be expressed. Although this allows for longer transgene expression, expression is less efficient. Similar methods for increasing capacity utilize homologous recombination. For example, a transgene can be divided between two transfer plasmids but with substantial sequence overlap such that co-expression induces homologous recombination and expression of the full-length transgene.

[0622] In certain AAVs, the cargo can include nucleic acids encoding one or more guide RNAs (e.g., DNA encoding a guide RNA, or DNA encoding two or more guide RNAs). In certain AAVs, the cargo can include a nucleic acid (e.g., DNA) encoding a Cas nuclease, such as Cas9, and DNA encoding one or more guide RNAs (e.g., DNA encoding a guide RNA, or DNA encoding two or more guide RNAs). In certain AAVs, the cargo can include a nucleic acid construct encoding a polypeptide of interest (e.g., multidomain therapeutic protein). In certain AAVs, the cargo can include a nucleic acid (e.g., DNA) encoding a Cas nuclease, such as Cas9, a DNA encoding a guide RNA (or multiple guide RNAs), and a nucleic acid construct encoding a polypeptide of interest (e.g., multidomain therapeutic protein).

[0623] For example, Cas or Cas9 and one or more gRNAs (e.g., 1 gRNA or 2 gRNAs or 3 gRNAs or 4 gRNAs) can be delivered via LNP-mediated delivery (e.g., in the form of RNA) or adeno-associated virus (AAV)-mediated delivery (e.g., rAAV8-mediated delivery). For example, a Cas9 mRNA and a gRNA can be delivered via LNP-mediated delivery, or DNA encoding Cas9 and DNA encoding a gRNA can be delivered via AAV-mediated delivery. The Cas or Cas9 and the gRNA(s) can be delivered in a single AAV or via two separate AAVs. For example, a first AAV can carry a Cas or Cas9 expression cassette, and a second AAV can carry a gRNA expression cassette. Similarly, a first AAV can carry a Cas or Cas9 expression cassette, and a second AAV can carry two or more gRNA expression cassettes. Alternatively, a single AAV can carry a Cas or Cas9 expression cassette (e.g., Cas or Cas9 coding sequence operably linked to a promoter) and a gRNA expression cassette (e.g., gRNA coding sequence operably linked to a promoter). Similarly, a single AAV can carry a Cas or Cas9 expression cassette (e.g., Cas or Cas9 coding sequence operably linked to a promoter) and two or more gRNA expression cassettes (e.g., gRNA coding sequences operably linked to promoters). Different promoters can be used to drive expression of the gRNA, such as a U6 promoter or the small tRNA Gln. Likewise, different promoters can be used to drive Cas9 expression. For example, small promoters are used so that the Cas9 coding sequence can fit into an AAV construct. Similarly, small Cas9 proteins (e.g., SaCas9 or CjCas9 are used to maximize the AAV packaging capacity).

### C. Cells or Animals or Genomes

[0624] Cells or animals (i.e., subjects) comprising any of the above compositions (e.g., nucleic acid construct encoding a polypeptide of interest (e.g., multidomain therapeutic protein), nuclease agents, vectors, lipid nanoparticles, or any combination thereof) are also provided herein. Such cells or animals (or genomes) can be produced by the methods disclosed herein. For example, the cells or animals can comprise any of the nucleic acid constructs encoding a polypeptide of interest (e.g., multidomain therapeutic protein) described herein, any of the nuclease agents disclosed herein, or both. Such cells or animals (or genomes) can be neonatal cells or animals (or genomes). Alternatively, such cells or animals (or genomes) can be non-neonatal cells or animals (or genomes).

[0625] A neonatal subject (e.g., animal) can be a human subject up to or under the age of 1 year (52 weeks), preferably up to or under the age of 24 weeks, more preferably up to or under the age of 12 weeks, more preferably up to or under the age of 8 weeks, and even more preferably up to or under the age of 4 weeks. In certain embodiments, a neonatal human subject is up to 4 weeks of age. In certain embodiments, a neonatal human subject is up to 8 weeks of age. In another embodiment, a neonatal human subject is within 3 weeks after birth. In another embodiment, a neonatal human subject is within 2 weeks after birth. In another embodiment, a neonatal human subject is within 1 week after birth. In another embodiment, a neonatal human subject is within 7 days after birth. In another embodiment, a neonatal human subject is within 6 days after birth. In another embodiment, a neonatal human subject is within 5 days after birth. In another embodiment, a neonatal human subject is within 4 days after birth. In another embodiment, a neonatal human subject is within 3 days after birth. In another embodiment, a neonatal human subject is within 2 days after birth. In another embodiment, a neonatal human subject is within 1 day after birth. The time windows disclosed above are for human subjects and are also meant to cover the corresponding developmental time windows for other animals.

[0626] Neonatal cells can be cells of any neonatal subject. For example, they can be of a human subject up to or under the age of 1 year (52 weeks), preferably up to or under the age of 24 weeks, more preferably up to or under the age of 12 weeks, more preferably up to or under the age of 8 weeks, and even more preferably up to or under the age of 4 weeks. In certain embodiments, a neonatal human subject is up to 4 weeks of age. In certain embodiments, a neonatal human subject is up to 8 weeks of age. In another embodiment, a neonatal human subject is within 3 weeks after birth. In another embodiment, a neonatal human subject is within 2 weeks after birth. In another embodiment, a neonatal human subject is within 1 week after birth. In another embodiment, a neonatal human subject is within 7 days after birth. In another embodiment, a neonatal human subject is within 6 days after birth. In another embodiment, a neonatal human subject is within 5 days after birth. In another embodiment, a neonatal human subject is within 4 days after birth. In another embodiment, a neonatal human subject is within 3 days after birth. In another embodiment, a neonatal human subject is within 2 days after birth. In another embodiment, a neonatal human subject is within 1 day after birth. The time windows disclosed above are for human subjects and are also meant to cover the corresponding developmental time windows for other animals.

[0627] In some such cells or animals or genomes, the nucleic acid construct encoding a polypeptide of interest (e.g., multidomain therapeutic protein) can be genomically integrated at a target genomic locus, such as a safe harbor locus (e.g., an ALB locus or a human ALB locus, such as intron 1 of an ALB locus or a human ALB locus). In some such cells, animals, or genomes, the polypeptide of interest (e.g., multidomain therapeutic protein) encoded by the nucleic acid construct is expressed in the cell, animal, or genome. For example, if the nucleic acid construct encoding a polypeptide of interest (e.g., multidomain therapeutic protein) is integrated into an ALB locus (e.g., intron 1 of a human ALB locus), the polypeptide of interest (e.g., multidomain therapeutic protein) can be expressed from the ALB locus. The coding sequence for the polypeptide of interest (e.g., multidomain therapeutic protein) can be operably linked to an endogenous promoter at the target genomic locus upon integration into the target genomic locus, or it can be operably linked to an exogenous promoter present in the nucleic acid construct. If the nucleic acid construct is a bidirectional nucleic acid construct disclosed herein, the neonatal genome, neonatal cell, or neonatal animal can express the first polypeptide of interest or can express the second polypeptide of interest. In some neonatal genomes, neonatal cells, or neonatal animals, the target genomic locus is an ALB locus. For example, the nucleic acid construct can be genomically integrated in intron 1 of the endogenous ALB locus. Endogenous ALB exon 1 can then splice into the coding sequence for the polypeptide of interest (e.g., multidomain therapeutic protein) in the nucleic acid construct.

[0628] The target genomic locus at which the nucleic acid construct is stably integrated can be heterozygous for the nucleic acid construct encoding a polypeptide of interest (e.g., multidomain therapeutic protein) or homozygous for the nucleic acid construct encoding a polypeptide of interest (e.g., multidomain therapeutic protein). A diploid organism has two alleles at each genetic locus. Each pair of alleles represents the genotype of a specific genetic locus. Genotypes are described as homozygous if there are two identical alleles at a particular locus and as heterozygous if the two alleles differ.

[0629] The cells, neonatal, or genomes can be from any suitable species, such as eukaryotic cells or eukaryotes, or mammalian cells or mammals (e.g., non-human mammalian cells or non-human mammals, or human cells or humans). A mammal can be, for example, a non-human mammal, a human, a rodent, a rat, a mouse, or a hamster. Other non-human mammals include, for example, non-human primates, e.g., monkeys and apes. The term “non-human” excludes humans. Examples include, but are not limited to, human cells/humans, rodent cells/rodents, mouse cells/mice, rat cells/rats, and non-human primate cells/non-human primates. In a specific example, the cell is a human cell or the animal is a human. Likewise, cells can be any suitable type of cell. In a specific example, the cell is a liver cell such as a hepatocyte (e.g., a human liver cell or human hepatocyte).

[0630] The cells can be isolated cells (e.g., in vitro), ex vivo cells, or can be in vivo within an animal (i.e., in a subject). The cells can be mitotically competent cells or mitotically-inactive cells, meiotically competent cells or meiotically-inactive cells. Similarly, the cells can also be primary somatic cells or cells that are not a primary somatic cell. Somatic cells include any cell that is not a gamete, germ cell, gametocyte, or undifferentiated stem cell. For example, the neonatal cells can be liver cells, such as hepatocytes (e.g., mouse, non-human primate, or human hepatocytes).

[0631] The cells provided herein can be normal, healthy cells, or can be diseased or mutant-bearing cells. For example, the cells can have a deficiency of the polypeptide of interest or can be from a subject with deficiency of the polypeptide of interest. For example, the cells can have a GAA deficiency, can carry a mutation that results in a GAA deficiency, or can be from a subject with a GAA deficiency carrying a mutation that results in a GAA deficiency, or Pompe disease. In some embodiments, the cells are of a neonatal subject.

[0632] The cells provided herein can be dividing cells (e.g., actively dividing cells). Alternatively, the cells provided herein can be non-dividing cells.

### III. Therapeutic Methods and Methods for Introducing, Integrating, or Expressing a Nucleic Acid Encoding a Polypeptide of Interest in Cells or Subjects

[0633] The nucleic acid constructs and compositions disclosed herein can be used in methods of inserting or integrating a nucleic acid encoding a polypeptide of interest into a target genomic locus or methods of expressing a polypeptide of interest in a cell, in a population of cells, or in a subject (e.g., in a neonatal cell, in a population of neonatal cells, or in a neonatal subject).

[0634] The multidomain therapeutic protein nucleic acid constructs and compositions disclosed herein can be used in methods of introducing a nucleic acid construct encoding a multidomain therapeutic protein into a cell or a population of cells or a subject (e.g., in a cell or population of cells in a subject), methods of inserting or integrating a nucleic acid construct encoding a multidomain therapeutic protein into a target genomic locus in a cell or a population of cells or a subject (e.g., in a cell or population of cells in a subject), methods of expressing a multidomain therapeutic protein in a cell or a population of cells or a subject (e.g., in a cell or population of cells in a subject), methods of reducing glycogen accumulation in a cell or a population of cells or a tissue in a subject (e.g., in a cell or population of cells in a subject), methods of treating Pompe disease or GAA deficiency in a subject, and methods or preventing or reducing the onset of a sign or symptom of Pompe disease or GAA deficiency in a subject.

[0635] The multidomain therapeutic protein compositions disclosed herein (e.g., multidomain therapeutic protein nucleic acid constructs, or multidomain therapeutic protein nucleic acid constructs in combination with the nuclease agents (e.g., CRISPR/Cas systems)) are useful for the treatment of GAA deficiency or Pompe disease and/or ameliorating at least one symptom associated with GAA deficiency or Pompe disease (e.g., as compared to a control, untreated subject). The multidomain therapeutic protein compositions disclosed herein (e.g., multidomain therapeutic protein nucleic acid constructs, or multidomain therapeutic protein nucleic acid constructs in combination with the nuclease agents (e.g., CRISPR/Cas systems)) are also useful for preventing or reducing the onset of a sign or symptom of GAA deficiency or Pompe disease (e.g., as compared to a control, untreated subject). Likewise, the compositions disclosed herein can be used for the preparation of a pharmaceutical composition or medicament for treating a subject having GAA deficiency or Pompe disease.

[0636] With respect to GAA deficiency or Pompe disease, the terms “treat,” “treated,” “treating,” and “treatment,” include the administration of the multidomain therapeutic domain nucleic acid constructs disclosed herein (e.g., together with a nuclease agent disclosed herein) to subjects to prevent or delay the onset of the symptoms, complications, or biochemical indicia of GAA deficiency or Pompe disease, alleviating the symptoms or arresting or inhibiting further development of GAA deficiency or Pompe disease. Treatment may be prophylactic (to prevent or delay the onset of GAA deficiency or Pompe disease, or to prevent the manifestation of clinical or subclinical symptoms thereof) or therapeutic suppression or alleviation of symptoms after the manifestation of GAA deficiency or Pompe disease.

[0637] GAA deficiency refers expression and/or activity levels of GAA being lower in the subject (e.g., neonatal subject) than normal GAA expression and/or activity levels, such that the normal functions of GAA are not fully carried out in the subject (e.g., resulting in Pompe disease). Pompe disease is also known as acid maltase deficiency, acid maltase deficiency disease, alpha-1,4-glucosidase deficiency, AMD, deficiency of alpha-glucosidase, GAA deficiency, glycogen storage disease type II, glycogenosis type II, GSD II, GSD2, and Pompe’s disease.

[0638] Pompe disease is an inherited disorder caused by the buildup of glycogen in the body’s cells. The accumulation of glycogen in certain organs and tissues, especially muscles, impairs their ability to function normally. Different types of Pompe disease differ in severity and the age at which they appear. These types are known as infantile-onset Pompe disease (classic infantile-onset, and non-classic infantile-onset) and late-onset Pompe disease. Subjects with late-onset Pompe disease have higher GAA enzyme levels than are found in infantile-onset forms of the disease, but generally less than 40 percent of normal enzyme activity. Classic infantile-onset Pompe disease patients typically have less than 1 percent of GAA enzyme activity, while those with non-classic forms usually have less than 10 percent.

[0639] The classic form of infantile-onset Pompe disease begins within a few months of birth. Some phenotypes, such as cardiomyopathies, can be present at birth. Infants with this disorder typically experience muscle weakness (myopathy), poor muscle tone (hypotonia), an enlarged liver (hepatomegaly), and heart defects. Affected infants may also fail to gain weight and grow at the expected rate (failure to thrive) and have breathing problems. If untreated, this form of Pompe disease leads to death from heart failure in the first year of life.

[0640] The non-classic form of infantile-onset Pompe disease usually appears by age 1. It is characterized by delayed motor skills (such as rolling over and sitting) and progressive muscle weakness. The heart may be abnormally large (cardiomegaly), but affected individuals usually do not experience heart failure. The muscle weakness in this disorder leads to serious breathing problems, and most children with non-classic infantile-onset Pompe disease live only into early childhood.

[0641] The late-onset type of Pompe disease may not become apparent until later in childhood, adolescence, or adulthood. Late-onset Pompe disease is usually milder than the infantile-onset forms of this disorder and is less likely to involve the heart. Most individuals with late-onset Pompe disease experience progressive muscle weakness, especially in the legs and the trunk, including the muscles that control breathing. As the disorder progresses, breathing problems can lead to respiratory failure.

[0642] Mutations in the GAA gene can cause Pompe disease. The GAA gene encodes an enzyme called alpha-glucosidase. This enzyme is active in lysosomes. The enzyme normally breaks down glycogen into glucose. Mutations in the GAA gene prevent acid alpha-glucosidase from breaking down glycogen effectively, which allows this sugar to build up to toxic levels in lysosomes. This buildup damages organs and tissues throughout the body, particularly the muscles, leading to the progressive signs and symptoms of Pompe disease.

[0643] Since this is a genetic condition, the people who get this disease inherit it from a parent. It is common, however, that neither parent shows any symptoms. The disease is rare. In the United States, only 1 person in 40,000 is affected by Pompe disease. It can affect both males and females of all ethnic groups.

[0644] Symptoms of Pompe disease can be different, depending on when the disease makes itself present. For classic type, infant symptoms can include the following: weak muscles, poor muscle tone, enlarged liver, failure to gain weight and grow at the expected rate (failure to thrive), trouble breathing, feeding problems, infections in the respiratory system, and problems with hearing. For non-classic type, infant symptoms can include the following: motor skills delayed (such as rolling over and sitting), muscles get steadily weaker, abnormally large heart, and breathing problems. For late-onset type, symptoms can include the following: the legs and the trunk get steadily weaker, breathing problems, enlarged heart, increasing difficulty in walking, muscle pain over a large area, loss of the ability to exercise, falling often, frequent lung infections, shortness of breath when the person pushes himself or herself, headaches in the morning, becoming tired during the day, losing weight, cannot swallow as easily as before, irregular heartbeat, increased difficulty hearing, and higher levels of creatine kinase.

[0645] Pathology in Pompe disease can begin long before subjects present with symptoms. Pompe disease can be diagnosed by taking a blood sample, and enzymes in the blood are studied and counted. Confirmation can be made via DNA testing. For example, GAA enzyme activity can be measured by flow-injection tandem mass spectrometry, and full sequencing of the GAA gene is performed in newborns with low GAA enzyme activity. See, e.g., Ficicioglu et al. (2020) Int. J. Neonatal Screen. 6(4):89, Tang et al. (2020) Int. J. Neonatal Screen. 6(1):9, and Klug et al. (2020) Int. J. Neonatal Screen 6(1):11, each of which is herein incorporated by reference in its entirety for all purposes. GAA activity can be assessed by any known method. For example, to assess GAA activity (or deficiencies of activity), blood-based assays can measure GAA activity in dried blood spots or fresh blood. GAA activity can also be measured in fibroblasts from a skin biopsy or muscle biopsy. Other secondary measures can be measuring urine glucose tetrasaccharides by mass spectrometry. These can be combined with genetic analyses to diagnose in infantile and late onset Pompe disease. Asymptomatic subjects can be considered to have Pompe disease if diagnosed by genetic screening. For example, a subject described herein is considered to have Pompe disease, even if they are asymptomatic, if they have reduced GAA activity and a pathogenic GAA variant or mutation. Pathogenic GAA mutations and variants associated with Pompe disease are known. See, e.g., Ficicioglu et al. (2020) Int. J. Neonatal Screen. 6(4):89, Tang et al. (2020) Int. J. Neonatal Screen. 6(1):9, and Klug et al. (2020) Int. J. Neonatal Screen 6(1):11, each of which is herein incorporated by reference in its entirety for all purposes.

[0646] As is the case for several other lysosomal diseases, Pompe disease is currently treated by enzyme replacement therapy (ERT). Recombinant human GAA is delivered by intravenous infusion into patients every other week. While ERT has been successful in treating the cardiac manifestations of Pompe disease, skeletal muscle and the central nervous system (CNS) remain minimally treated by ERT.

[0647] The cells or populations of cells can be neonatal cells or populations of neonatal cells, and the subject can be neonatal subjects in some methods of introducing a nucleic acid construct encoding a multidomain therapeutic protein into a cell or a population of cells or a subject (e.g., in a cell or population of cells in a subject), methods of inserting or integrating a nucleic acid construct encoding a multidomain therapeutic protein into a target genomic locus in a cell or a population of cells or a subject (e.g., in a cell or population of cells in a subject), methods of expressing a multidomain therapeutic protein in a cell or a population of cells or a subject (e.g., in a cell or population of cells in a subject), methods of reducing glycogen accumulation in a cell or a population of cells or a tissue in a subject (e.g., in a cell or population of cells in a subject), and methods of treating Pompe disease or GAA deficiency in a subject. A neonatal subject can be a human subject up to or under the age of 1 year (52 weeks), preferably up to or under the age of 24 weeks, more preferably up to or under the age of 12 weeks, more preferably up to or under the age of 8 weeks, and even more preferably up to or under the age of 4 weeks. In certain embodiments, a neonatal human subject is up to 4 weeks of age. In certain embodiments, a neonatal human subject is up to 8 weeks of age. In another embodiment, a neonatal human subject is within 3 weeks after birth. In another embodiment, a neonatal human subject is within 2 weeks after birth. In another embodiment, a neonatal human subject is within 1 week after birth. In another embodiment, a neonatal human subject is within 7 days after birth. In another embodiment, a neonatal human subject is within 6 days after birth. In another embodiment, a neonatal human subject is within 5 days after birth. In another embodiment, a neonatal human subject is within 4 days after birth. In another embodiment, a neonatal human subject is within 3 days after birth. In another embodiment, a neonatal human subject is within 2 days after birth. In another embodiment, a neonatal human subject is within 1 day after birth. The time windows disclosed above are for human subjects and are also meant to cover the corresponding developmental time windows for other animals. As used herein, a “neonatal cell” is a cell of a neonatal subject, and a population of neonatal cells is a population of cells of a neonatal subject. In other methods, the cells or populations of cells are not neonatal cells and are not populations of neonatal cells, and the subjects are not neonatal subjects.

[0648] In one example, provided herein are methods of introducing a nucleic acid encoding a multidomain therapeutic protein into a cell or a population of cells or a subject in need thereof (e.g., in a cell or a population of cells in the subject). The cells or populations of cells can be neonatal cells or populations of neonatal cells, and the subject can be neonatal subjects in some methods. In other methods, the cells or populations of cells are not neonatal cells and are not populations of neonatal cells, and the subjects are not neonatal subjects. Such methods can comprise administering any of the multidomain therapeutic protein nucleic acid constructs described herein (or any of the compositions comprising a multidomain therapeutic protein nucleic acid construct described herein, including, for example, vectors or lipid nanoparticles) to the cell. The multidomain therapeutic protein nucleic acid construct can be administered together with a nuclease agent described herein, or can be administered alone. For example, the multidomain therapeutic protein nucleic acid construct can be one that expresses the multidomain therapeutic protein without being integrated into target genomic locus (e.g., an episomal vector or an expression vector in which the coding sequence for the multidomain therapeutic protein is operably linked to a promoter). In some methods, the multidomain therapeutic protein nucleic acid construct can be administered together with a nuclease agent described herein (e.g., simultaneously or sequentially in any order). The nuclease agent can cleave a nuclease target sequence within a target genomic locus (e.g., target gene), the multidomain therapeutic protein nucleic acid construct can be inserted into the target genomic locus to create a modified target genomic locus, and the multidomain therapeutic protein can be expressed from the modified target genomic locus. The multidomain therapeutic protein coding sequence can be operably linked to an endogenous promoter at the target genomic locus upon integration into the target genomic locus, or it can be operably linked to an exogenous promoter present in the nucleic acid construct. In one example, the nuclease agent is a CRISPR/Cas system, and the target gene is ALB (e.g., intron 1 of ALB). In such methods, the guide RNA can bind to the Cas protein and target the Cas protein to the guide RNA target sequence in intron 1 of the ALB gene, the Cas protein can cleave the guide RNA target sequence, the nucleic acid construct can be inserted into the ALB gene to create a modified ALB gene, and multidomain therapeutic protein can be expressed from the modified ALB gene.

[0649] In another example, provided herein are methods of expressing a multidomain therapeutic protein in a cell or a population of cells or a subject in need thereof (e.g., in a cell or a population of cells in the subject). The cells or populations of cells can be neonatal cells or populations of neonatal cells, and the subject can be neonatal subjects in some methods. In other methods, the cells or populations of cells are not neonatal cells and are not populations of neonatal cells, and the subjects are not neonatal subjects. Such methods can comprise administering any of the multidomain therapeutic protein nucleic acid constructs described herein (or any of the compositions comprising a multidomain therapeutic protein nucleic acid construct described herein, including, for example, vectors or lipid nanoparticles) to the cell. In some methods, the multidomain therapeutic protein nucleic acid construct or composition comprising the multidomain therapeutic protein nucleic acid construct can be administered without a nuclease agent (e.g., if the multidomain therapeutic protein nucleic acid construct comprises elements needed for expression of the multidomain therapeutic protein without integration into a target genomic locus). In some methods, the multidomain therapeutic protein nucleic acid construct can be administered together with a nuclease agent described herein (e.g., simultaneously or sequentially in any order). The nuclease agent can cleave a nuclease target sequence within a target genomic locus (e.g., target gene), the multidomain therapeutic protein nucleic acid construct can be inserted into the target genomic locus to create a modified target genomic locus, and multidomain therapeutic protein can be expressed from the modified target genomic locus. The multidomain therapeutic protein coding sequence can be operably linked to an endogenous promoter at the target genomic locus upon integration into the target genomic locus, or it can be operably linked to an exogenous promoter present in the nucleic acid construct. In one example, the nuclease agent is a CRISPR/Cas system, and the target gene is ALB (e.g., intron 1 of ALB). In such methods, the guide RNA can bind to the Cas protein and target the Cas protein to the guide RNA target sequence in intron 1 of the ALB gene, the Cas protein can cleave the guide RNA target sequence, the nucleic acid construct can be inserted into the ALB gene to create a modified ALB gene, and multidomain therapeutic protein can be expressed from the modified ALB gene.

[0650] In another example, provided herein are methods of inserting or integrating a multidomain therapeutic protein nucleic acid construct into a target genomic locus in a cell or a population of cells or a subject in need thereof (e.g., in a cell or a population of cells in the subject). The cells or populations of cells can be neonatal cells or populations of neonatal cells, and the subject can be neonatal subjects in some methods. In other methods, the cells or populations of cells are not neonatal cells and are not populations of neonatal cells, and the subjects are not neonatal subjects. Such methods can comprise administering any of the multidomain therapeutic protein nucleic acid constructs described herein (or any of the compositions comprising a multidomain therapeutic protein nucleic acid construct described herein, including, for example, vectors or lipid nanoparticles) to the cell. In some methods, the multidomain therapeutic protein nucleic acid construct or composition comprising the multidomain therapeutic protein nucleic acid construct can be administered together with a nuclease agent described herein (e.g., simultaneously or sequentially in any order). The nuclease agent can cleave a nuclease target sequence within a target genomic locus (e.g., target gene), the multidomain therapeutic protein nucleic acid construct can be inserted into the target genomic locus to create a modified target genomic locus, and the multidomain therapeutic protein can be expressed from the modified target genomic locus. The multidomain therapeutic protein coding sequence can be operably linked to an endogenous promoter at the target genomic locus upon integration into the target genomic locus, or it can be operably linked to an exogenous promoter present in the nucleic acid construct. In one example, the nuclease agent is a CRISPR/Cas system, and the target gene is ALB (e.g., intron 1 of ALB). In such methods, the guide RNA can bind to the Cas protein and target the Cas protein to the guide RNA target sequence in intron 1 of the ALB gene, the Cas protein can cleave the guide RNA target sequence, the nucleic acid construct can be inserted into the ALB gene to create a modified ALB gene, and multidomain therapeutic protein can be expressed from the modified ALB gene.

[0651] In any of the above methods, the cells can be from any suitable species, such as eukaryotic cells or mammalian cells (e.g., non-human mammalian cells or human cells). A mammal can be, for example, a non-human mammal, a human, a rodent, a rat, a mouse, or a hamster. Other non-human mammals include, for example, non-human primates, e.g., monkeys and apes. The term “non-human” excludes humans. Specific examples include, but are not limited to, human cells, rodent cells, mouse cells, rat cells, and non-human primate cells. In a specific example, the cell is a human cell. Likewise, cells can be any suitable type of cell. In a specific example, the cell is a liver cell such as a hepatocyte (e.g., a human liver cell or human hepatocyte). The cells can be neonatal cells, or they can be non-neonatal cells.

[0652] The cells can be isolated cells (e.g., in vitro), ex vivo cells, or can be in vivo within an animal (i.e., in a subject). In a specific example, the cell is in vivo (e.g., in a subject having a GAA deficiency or Pompe disease). The cells can be mitotically competent cells or mitotically-inactive cells, meiotically competent cells or meiotically-inactive cells. Similarly, the cells can also be primary somatic cells or cells that are not a primary somatic cell. Somatic cells include any cell that is not a gamete, germ cell, gametocyte, or undifferentiated stem cell. For example, the cells can be liver cells, such as hepatocytes (e.g., mouse, non-human primate, or human hepatocytes).

[0653] The cells provided herein can be normal, healthy cells, or can be diseased or mutant-bearing cells. For example, the cells can have a GAA deficiency or can be from a subject with GAA deficiency or Pompe disease.

[0654] Also provided are methods of treating a lysosomal alpha-glucosidase (GAA) deficiency in a subject in need thereof (e.g., a subject with Pompe disease). The Pompe disease can be any type of Pompe disease (e.g., infantile-onset Pompe disease (classic infantile-onset or non-classic infantile-onset) or late-onset Pompe disease). For example, the subject can have infantile-onset Pompe disease (e.g., classical infantile-onset Pompe disease). Pompe disease is described in more detail elsewhere herein. In some methods, the expressed multidomain therapeutic protein is delivered to and internalized by skeletal muscle, liver, or heart tissue in the subject. In some methods, the expressed multidomain therapeutic protein is delivered to and internalized by skeletal muscle or heart tissue in the subject. In some methods, the expressed multidomain therapeutic protein is delivered to and internalized by skeletal muscle tissue in the subject. In some methods, the expressed multidomain therapeutic protein is delivered to and internalized by liver tissue in the subject. In some methods, the expressed multidomain therapeutic protein is delivered to and internalized by heart tissue in the subject. In some methods, the expressed multidomain therapeutic protein is delivered to and internalized by skeletal muscle, liver, and heart tissue in the subject. In some methods, the expressed multidomain therapeutic protein is delivered to and internalized by skeletal muscle and heart tissue in the subject. In some methods, the expressed multidomain therapeutic protein is delivered to and internalized by skeletal muscle, liver, heart, or central nervous system tissue in the subject. In some methods, the expressed multidomain therapeutic protein is delivered to and internalized by skeletal muscle, heart, or central nervous system tissue in the subject. In some methods, the expressed multidomain therapeutic protein is delivered to and internalized by skeletal muscle tissue in the subject. In some methods, the expressed multidomain therapeutic protein is delivered to and internalized by liver tissue in the subject. In some methods, the expressed multidomain therapeutic protein is delivered to and internalized by heart tissue in the subject. In some methods, the expressed multidomain therapeutic protein is delivered to and internalized by central nervous system tissue in the subject. In some methods, the expressed multidomain therapeutic protein is delivered to and internalized by skeletal muscle, liver, heart, and central nervous system tissue in the subject. In some methods, the expressed multidomain therapeutic protein is delivered to and internalized by skeletal muscle, heart, and central nervous system tissue in the subject. In some methods, the method reduces glycogen accumulation in skeletal muscle, liver, or heart tissue in the subject. In some methods, the method reduces glycogen accumulation in skeletal muscle or heart tissue in the subject. In some methods, the method reduces glycogen accumulation in skeletal muscle tissue in the subject. In some methods, the method reduces glycogen accumulation in liver tissue in the subject. In some methods, the method reduces glycogen accumulation in heart tissue in the subject. For example, glycogen accumulation can be reduced in skeletal muscle, liver, and heart tissue in the subject. For example, glycogen accumulation can be reduced in skeletal muscle and heart tissue in the subject. In some methods, the method reduces glycogen accumulation in skeletal muscle, liver, heart, or central nervous system tissue in the subject. In some methods, the method reduces glycogen accumulation in skeletal muscle, heart, or central nervous system tissue in the subject. In some methods, the method reduces glycogen accumulation in skeletal muscle tissue in the subject. In some methods, the method reduces glycogen accumulation in liver tissue in the subject. In some methods, the method reduces glycogen accumulation in heart tissue in the subject. In some methods, the method reduces glycogen accumulation in central nervous system tissue in the subject. For example, glycogen accumulation can be reduced in skeletal muscle, liver, heart, and central nervous system tissue in the subject. For example, glycogen accumulation can be reduced in skeletal muscle, heart, and central nervous system tissue in the subject. In some cases, glycogen levels are reduced to wild type levels. In some cases, glycogen levels in skeletal muscle, heart, and/or central nervous system tissue are reduced to levels comparable to wild type levels at the same age. In some methods, the method improves muscle strength in the subject (e.g., restores muscle strength to wild type levels). In some methods, the method prevents loss of muscle strength in the subject compared to a control. In some methods, the method results in the subject having muscle strength comparable to wild type levels at the same age. Such methods can comprise administering any of the multidomain therapeutic protein nucleic acid constructs described herein (or any of the compositions comprising a multidomain therapeutic protein nucleic acid construct described herein, including, for example, vectors or lipid nanoparticles) to the subject such that a therapeutically effective level of multidomain therapeutic protein or GAA expression or a therapeutically effective level of circulating multidomain therapeutic protein or GAA is achieved in the subject. In some methods, the multidomain therapeutic protein nucleic acid construct or composition comprising the multidomain therapeutic protein nucleic acid construct can be administered without a nuclease agent (e.g., if the multidomain therapeutic protein nucleic acid construct comprises elements needed for expression of multidomain therapeutic protein without integration into a target genomic locus). In some methods, the multidomain therapeutic protein nucleic acid construct can be administered together with a nuclease agent described herein (e.g., simultaneously or sequentially in any order). The nuclease agent can cleave a nuclease target sequence within a target genomic locus (e.g., target gene), the multidomain therapeutic protein nucleic acid construct can be inserted into the target genomic locus to create a modified target genomic locus, and the multidomain therapeutic protein can be expressed from the modified target genomic locus (e.g., such that a therapeutically effective level of multidomain therapeutic protein or GAA expression or a therapeutically effective level of circulating multidomain therapeutic protein or GAA is achieved in the subject). The multidomain therapeutic protein coding sequence can be operably linked to an endogenous promoter at the target genomic locus upon integration into the target genomic locus, or it can be operably linked to an exogenous promoter present in the nucleic acid construct. In one example, the nuclease agent is a CRISPR/Cas system, and the target gene is ALB (e.g., intron 1 of ALB). In such methods, the guide RNA can bind to the Cas protein and target the Cas protein to the guide RNA target sequence in intron 1 of the ALB gene, the Cas protein can cleave the guide RNA target, the nucleic acid construct can be inserted into the ALB gene to create a modified ALB gene, and multidomain therapeutic protein can be expressed from the modified ALB gene (e.g., such that a therapeutically effective level of multidomain therapeutic protein or GAA expression or a therapeutically effective level of circulating multidomain therapeutic protein or GAA is achieved in the subject).

[0655] Also provided are methods of reducing glycogen accumulation in a cell or a population of cells or a tissue in a subject in need thereof (e.g., a subject with Pompe disease). Similarly, provided are methods of reducing glycogen accumulation in a cell or a population of cells. The Pompe disease can be any type of Pompe disease (e.g., infantile-onset Pompe disease (classic infantile-onset or non-classic infantile-onset) or late-onset Pompe disease). For example, the subject can have infantile-onset Pompe disease (e.g., classical infantile-onset Pompe disease). Pompe disease is described in more detail elsewhere herein. In some methods, the method reduces glycogen accumulation in skeletal muscle, liver, or heart tissue in the subject. In some methods, the method reduces glycogen accumulation in skeletal muscle or heart tissue in the subject. In some methods, the method reduces glycogen accumulation in skeletal muscle tissue in the subject. In some methods, the method reduces glycogen accumulation in liver tissue in the subject. In some methods, the method reduces glycogen accumulation in heart tissue in the subject. For example, glycogen accumulation can be reduced in skeletal muscle, liver, and heart tissue in the subject. For example, glycogen accumulation can be reduced in skeletal muscle and heart tissue in the subject. In some methods, the method reduces glycogen accumulation in skeletal muscle, liver, heart, or central nervous system tissue in the subject. In some methods, the method reduces glycogen accumulation in skeletal muscle, heart, or central nervous system tissue in the subject. In some methods, the method reduces glycogen accumulation in skeletal muscle tissue in the subject. In some methods, the method reduces glycogen accumulation in liver tissue in the subject. In some methods, the method reduces glycogen accumulation in heart tissue in the subject. In some methods, the method reduces glycogen accumulation in central nervous system tissue in the subject. For example, glycogen accumulation can be reduced in skeletal muscle, liver, heart, and central nervous system tissue in the subject. For example, glycogen accumulation can be reduced in skeletal muscle, heart, and central nervous system tissue in the subject. In some cases, glycogen levels are reduced to wild type levels. In some cases, glycogen levels in skeletal muscle, heart, and/or central nervous system tissue are reduced to levels comparable to wild type levels at the same age. In some methods, the method improves muscle strength in the subject (e.g., restores muscle strength to wild type levels). In some methods, the method prevents loss of muscle strength in the subject compared to a control. In some methods, the method results in the subject having muscle strength comparable to wild type levels at the same age. Such methods can comprise administering any of the multidomain therapeutic protein nucleic acid constructs described herein (or any of the compositions comprising a multidomain therapeutic protein nucleic acid construct described herein, including, for example, vectors or lipid nanoparticles) to the subject such that a therapeutically effective level of multidomain therapeutic protein or GAA expression or a therapeutically effective level of circulating multidomain therapeutic protein or GAA is achieved in the subject. In some methods, the multidomain therapeutic protein nucleic acid construct or composition comprising the multidomain therapeutic protein nucleic acid construct can be administered without a nuclease agent (e.g., if the multidomain therapeutic protein nucleic acid construct comprises elements needed for expression of multidomain therapeutic protein without integration into a target genomic locus). In some methods, the multidomain therapeutic protein nucleic acid construct can be administered together with a nuclease agent described herein (e.g., simultaneously or sequentially in any order). The nuclease agent can cleave a nuclease target sequence within a target genomic locus (e.g., target gene), the multidomain therapeutic protein nucleic acid construct can be inserted into the target genomic locus to create a modified target genomic locus, and the multidomain therapeutic protein can be expressed from the modified target genomic locus (e.g., such that a therapeutically effective level of multidomain therapeutic protein or GAA expression or a therapeutically effective level of circulating multidomain therapeutic protein or GAA is achieved in the subject). The multidomain therapeutic protein coding sequence can be operably linked to an endogenous promoter at the target genomic locus upon integration into the target genomic locus, or it can be operably linked to an exogenous promoter present in the nucleic acid construct. In one example, the nuclease agent is a CRISPR/Cas system, and the target gene is ALB (e.g., intron 1 of ALB). In such methods, the guide RNA can bind to the Cas protein and target the Cas protein to the guide RNA target sequence in intron 1 of the ALB gene, the Cas protein can cleave the guide RNA target, the nucleic acid construct can be inserted into the ALB gene to create a modified ALB gene, and multidomain therapeutic protein can be expressed from the modified ALB gene (e.g., such that a therapeutically effective level of multidomain therapeutic protein or GAA expression or a therapeutically effective level of circulating multidomain therapeutic protein or GAA is achieved in the subject).

[0656] Also provided are methods of treating Pompe disease in a subject. The Pompe disease can be any type of Pompe disease (e.g., infantile-onset Pompe disease (classic infantile-onset or non-classic infantile-onset) or late-onset Pompe disease). For example, the subject can have infantile-onset Pompe disease (e.g., classical infantile-onset Pompe disease). Pompe disease is described in more detail elsewhere herein. In some methods, the method reduces glycogen accumulation in skeletal muscle, liver, or heart tissue in the subject. In some methods, the method reduces glycogen accumulation in skeletal muscle or heart tissue in the subject. In some methods, the method reduces glycogen accumulation in skeletal muscle tissue in the subject. In some methods, the method reduces glycogen accumulation in liver tissue in the subject. In some methods, the method reduces glycogen accumulation in heart tissue in the subject. For example, glycogen accumulation can be reduced in skeletal muscle, liver, and heart tissue in the subject. For example, glycogen accumulation can be reduced in skeletal muscle and heart tissue in the subject. In some methods, the method reduces glycogen accumulation in skeletal muscle, liver, heart, or central nervous system tissue in the subject. In some methods, the method reduces glycogen accumulation in skeletal muscle, heart, or central nervous system tissue in the subject. In some methods, the method reduces glycogen accumulation in skeletal muscle tissue in the subject. In some methods, the method reduces glycogen accumulation in liver tissue in the subject. In some methods, the method reduces glycogen accumulation in heart tissue in the subject. In some methods, the method reduces glycogen accumulation in central nervous system tissue in the subject. For example, glycogen accumulation can be reduced in skeletal muscle, liver, heart, and central nervous system tissue in the subject. For example, glycogen accumulation can be reduced in skeletal muscle, heart, and central nervous system tissue in the subject. In some cases, glycogen levels are reduced to wild type levels. In some cases, glycogen levels in skeletal muscle, heart, and/or central nervous system tissue are reduced to levels comparable to wild type levels at the same age. In some methods, the method improves muscle strength in the subject (e.g., restores muscle strength to wild type levels). In some methods, the method prevents loss of muscle strength in the subject compared to a control. In some methods, the method results in the subject having muscle strength comparable to wild type levels at the same age. Such methods can comprise administering any of the multidomain therapeutic protein nucleic acid constructs described herein (or any of the compositions comprising a multidomain therapeutic protein nucleic acid construct described herein, including, for example, vectors or lipid nanoparticles) to the subject such that a therapeutically effective level of multidomain therapeutic protein or GAA expression or a therapeutically effective level of circulating multidomain therapeutic protein or GAA is achieved in the subject. In some methods, the multidomain therapeutic protein nucleic acid construct or composition comprising the multidomain therapeutic protein nucleic acid construct can be administered without a nuclease agent (e.g., if the multidomain therapeutic protein nucleic acid construct comprises elements needed for expression of multidomain therapeutic protein without integration into a target genomic locus). In some methods, the multidomain therapeutic protein nucleic acid construct can be administered together with a nuclease agent described herein (e.g., simultaneously or sequentially in any order). The nuclease agent can cleave a nuclease target sequence within a target genomic locus (e.g., target gene), the multidomain therapeutic protein nucleic acid construct can be inserted into the target genomic locus to create a modified target genomic locus, and the multidomain therapeutic protein can be expressed from the modified target genomic locus (e.g., such that a therapeutically effective level of multidomain therapeutic protein or GAA expression or a therapeutically effective level of circulating multidomain therapeutic protein or GAA is achieved in the subject). The multidomain therapeutic protein coding sequence can be operably linked to an endogenous promoter at the target genomic locus upon integration into the target genomic locus, or it can be operably linked to an exogenous promoter present in the nucleic acid construct. In one example, the nuclease agent is a CRISPR/Cas system, and the target gene is ALB (e.g., intron 1 of ALB). In such methods, the guide RNA can bind to the Cas protein and target the Cas protein to the guide RNA target sequence in intron 1 of the ALB gene, the Cas protein can cleave the guide RNA target, the nucleic acid construct can be inserted into the ALB gene to create a modified ALB gene, and multidomain therapeutic protein can be expressed from the modified ALB gene (e.g., such that a therapeutically effective level of multidomain therapeutic protein or GAA expression or a therapeutically effective level of circulating multidomain therapeutic protein or GAA is achieved in the subject).

[0657] Treatment refers to any administration or application of a therapeutic for disease or disorder in a subject, and includes inhibiting the disease, arresting its development, relieving one or more symptoms of the disease, curing the disease, or preventing reoccurrence of one or more symptoms of the disease. For example, treatment of Pompe disease may comprise alleviating symptoms of Pompe disease. Pompe disease is described in detail above and refers to a disorder caused by a missing or defective GAA gene or GAA polypeptide. The defective GAA gene or GAA polypeptide can result in reduced GAA expression and/or a activity of GAA.

[0658] Also provided are methods of preventing or reducing the onset of a sign or symptom of Pompe disease in a subject (e.g., as compared to an untreated, control subject). By preventing is meant the sign or symptom of the Pompe disease never becomes present. Such signs and symptoms are well-known and are described in more detail elsewhere herein. The Pompe disease can be any type of Pompe disease (e.g., infantile-onset Pompe disease (classic infantile-onset or non-classic infantile-onset) or late-onset Pompe disease). For example, Pompe disease can be infantile-onset Pompe disease (e.g., classical infantile-onset Pompe disease). Pompe disease is described in more detail elsewhere herein. In some methods, the method prevents or reduces glycogen accumulation in skeletal muscle, liver, or heart tissue in the subject. In some methods, the method prevents or reduces glycogen accumulation in skeletal muscle or heart tissue in the subject. In some methods, the method prevents or reduces glycogen accumulation in skeletal muscle tissue in the subject. In some methods, the method prevents or reduces glycogen accumulation in liver tissue in the subject. In some methods, the method prevents or reduces glycogen accumulation in heart tissue in the subject. For example, glycogen accumulation can be prevented or reduced in skeletal muscle, liver, and heart tissue in the subject. For example, glycogen accumulation can be prevented or reduced in skeletal muscle and heart tissue in the subject. In some methods, the method prevents or reduces glycogen accumulation in skeletal muscle, liver, heart, or central nervous system tissue in the subject. In some methods, the method prevents or reduces glycogen accumulation in skeletal muscle, heart, or central nervous system tissue in the subject. In some methods, the method prevents or reduces glycogen accumulation in skeletal muscle tissue in the subject. In some methods, the method prevents or reduces glycogen accumulation in liver tissue in the subject. In some methods, the method prevents or reduces glycogen accumulation in heart tissue in the subject. In some methods, the method prevents or reduces glycogen accumulation in central nervous system tissue in the subject. For example, glycogen accumulation can be prevented or reduced in skeletal muscle, liver, heart, and central nervous system tissue in the subject. For example, the onset of glycogen accumulation can be prevented or reduced in skeletal muscle, heart, and central nervous system tissue in the subject. Such methods can comprise administering any of the multidomain therapeutic protein nucleic acid constructs described herein (or any of the compositions comprising a multidomain therapeutic protein nucleic acid construct described herein, including, for example, vectors or lipid nanoparticles) to the subject such that a therapeutically effective level of multidomain therapeutic protein or GAA expression or a therapeutically effective level of circulating multidomain therapeutic protein or GAA is achieved in the subject. In some methods, the multidomain therapeutic protein nucleic acid construct or composition comprising the multidomain therapeutic protein nucleic acid construct can be administered without a nuclease agent (e.g., if the multidomain therapeutic protein nucleic acid construct comprises elements needed for expression of multidomain therapeutic protein without integration into a target genomic locus). In some methods, the multidomain therapeutic protein nucleic acid construct can be administered together with a nuclease agent described herein (e.g., simultaneously or sequentially in any order). The nuclease agent can cleave a nuclease target sequence within a target genomic locus (e.g., target gene), the multidomain therapeutic protein nucleic acid construct can be inserted into the target genomic locus to create a modified target genomic locus, and the multidomain therapeutic protein can be expressed from the modified target genomic locus (e.g., such that a therapeutically effective level of multidomain therapeutic protein or GAA expression or a therapeutically effective level of circulating multidomain therapeutic protein or GAA is achieved in the subject). The multidomain therapeutic protein coding sequence can be operably linked to an endogenous promoter at the target genomic locus upon integration into the target genomic locus, or it can be operably linked to an exogenous promoter present in the nucleic acid construct. In one example, the nuclease agent is a CRISPR/Cas system, and the target gene is ALB (e.g., intron 1 of ALB). In such methods, the guide RNA can bind to the Cas protein and target the Cas protein to the guide RNA target sequence in intron 1 of the ALB gene, the Cas protein can cleave the guide RNA target, the nucleic acid construct can be inserted into the ALB gene to create a modified ALB gene, and multidomain therapeutic protein can be expressed from the modified ALB gene (e.g., such that a therapeutically effective level of multidomain therapeutic protein or GAA expression or a therapeutically effective level of circulating multidomain therapeutic protein or GAA is achieved in the subject).

[0659] In some methods, a therapeutically effective amount of the multidomain therapeutic protein nucleic acid construct or the composition comprising the multidomain therapeutic protein nucleic acid construct or the combination of the multidomain therapeutic protein nucleic acid construct and the nuclease agent (e.g., CRISPR/Cas system) is administered to the subject. A therapeutically effective amount is an amount that produces the desired effect for which it is administered. The exact amount will depend on the purpose of the treatment, and will be ascertainable by one skilled in the art using known techniques. See, e.g., Lloyd (1999) The Art, Science and Technology of Pharmaceutical Compounding. In a specific example, serum levels of at least about 2 µg/mL or at least about 5 µg/mL of the multidomain therapeutic protein are considered therapeutically effective and correspond to complete correction of glycogen storage in muscles.

[0660] Therapeutic or pharmaceutical compositions comprising the compositions disclosed herein can be administered with suitable carriers, excipients, and other agents that are incorporated into formulations to provide improved transfer, delivery, tolerance, and the like. A multitude of appropriate formulations can be found in the formulary known to all pharmaceutical chemists: Remington’s Pharmaceutical Sciences, Mack Publishing Company, Easton, PA. See also Powell et al. “Compendium of excipients for parenteral formulations” PDA (1998) J. Pharm. Sci. Technol. 52:238-311. In certain embodiments, the pharmaceutical compositions are non-pyrogenic.

[0661] The compositions disclosed herein may be administered to relieve or prevent or decrease the severity of one or more of the symptoms of GAA deficiency or Pompe disease. Such symptoms are described in more detail elsewhere herein.

[0662] The subject in any of the above methods can be one in need of amelioration or treatment of GAA deficiency or Pompe disease. The subject in any of the above methods can be from any suitable species, such as a eukaryote or a mammal. A mammal can be, for example, a non-human mammal, a human, a rodent, a rat, a mouse, or a hamster. Other non-human mammals include, for example, non-human primates, e.g., monkeys and apes. The term “non-human” excludes humans. Specific examples of suitable species include, but are not limited to, humans, rodents, mice, rats, and non-human primates. In a specific example, the subject is a human. The subject in some methods can be a neonatal subject. In other methods, the subject is not a neonatal subject.

[0663] In methods in which a multidomain therapeutic protein nucleic acid construct is genomically integrated, any target genomic locus capable of expressing a gene can be used, such as a safe harbor locus (safe harbor gene) or an endogenous GAA locus. Such loci are described in more detail elsewhere herein. In a specific example, the target genomic locus can be an endogenous ALB locus, such as an endogenous human ALB locus. For example, the nucleic acid construct can be genomically integrated in intron 1 of the endogenous ALB locus. Endogenous ALB exon 1 can then splice into the coding sequence for the multidomain therapeutic protein in the nucleic acid construct.

[0664] Targeted insertion of the multidomain therapeutic protein nucleic acid construct comprising the multidomain therapeutic protein coding sequence into a target genomic locus, and particularly an endogenous ALB locus, offers multiple advantages. Such methods result in stable modification to allow for stable, long-term expression of the multidomain therapeutic protein coding sequence. With respect to the ALB locus, such methods are able to utilize the endogenous ALB promoter and regulatory regions to achieve therapeutically effective levels of expression. For example, the multidomain therapeutic protein coding sequence in the nucleic acid construct can comprise a promoterless gene, and the inserted nucleic acid construct can be operably linked to an endogenous promoter in the target genomic locus (e.g., ALB locus). Use of an endogenous promoter is advantageous because it obviates the need for inclusion of a promoter in the nucleic acid construct, allowing packaging of larger transgenes that may not normally package efficiently (e.g., in AAV). Alternatively, the multidomain therapeutic protein coding sequence in the nucleic acid construct can be operably linked to an exogenous promoter in the nucleic acid construct. Examples of types of promoters that can be used are disclosed elsewhere herein.

[0665] Optionally, some or all of the endogenous gene (e.g., endogenous ALB gene) at the target genomic locus can be expressed upon insertion of the multidomain therapeutic protein coding sequence from the nucleic acid construct. Alternatively, in some methods, none of the endogenous gene at the target genomic locus is expressed. As one example, the modified target genomic locus (e.g., modified ALB locus) after integration of the nucleic acid construct can encode a chimeric protein comprising an endogenous secretion signal (e.g., albumin secretion signal) and the multidomain therapeutic protein encoded by the nucleic acid construct. In another example, the first intron of an ALB locus can be targeted. The secretion signal peptide of ALB is encoded by exon 1 of the ALB gene. In such a scenario, a promoterless cassette bearing a splice acceptor and the multidomain therapeutic protein coding sequence will support expression and secretion of the multidomain therapeutic protein. Splicing between endogenous ALB exon 1 and the integrated multidomain therapeutic protein coding sequence creates a chimeric mRNA and protein including the endogenous ALB sequence encoded by exon 1 operably linked to the multidomain therapeutic protein sequence encoded by the integrated nucleic acid construct.

[0666] The multidomain therapeutic protein nucleic acid construct can be inserted into the target genomic locus by any means, including homologous recombination (HR) and non-homologous end joining (NHEJ) as described elsewhere herein. In a specific example, the multidomain therapeutic protein nucleic acid construct is inserted by NHEJ (e.g., does not comprise a homology arm and is inserted by NHEJ).

[0667] In another specific example, the nucleic acid construct can be inserted via homology-independent targeted integration (e.g., directional homology-independent targeted integration). For example, the multidomain therapeutic protein coding sequence in the nucleic acid construct can be flanked on each side by a target site for a nuclease agent (e.g., the same target site as in the target genomic locus, and the same nuclease agent being used to cleave the target site in the target genomic locus). The nuclease agent can then cleave the target sites flanking the multidomain therapeutic protein coding sequence. In a specific example, the nucleic acid construct is delivered AAV-mediated delivery, and cleavage of the target sites flanking the multidomain therapeutic protein coding sequence can remove the inverted terminal repeats (ITRs) of the AAV. Removal of the ITRs can make it easier to assess successful targeting, because presence of the ITRs can hamper sequencing efforts due to the repeated sequences. In some methods, the target site in the target genomic locus (e.g., a gRNA target sequence including the flanking protospacer adjacent motif) is no longer present if the multidomain therapeutic protein coding sequence is inserted into the target genomic locus in the correct orientation but it is reformed if the multidomain therapeutic protein coding sequence is inserted into the target genomic locus in the opposite orientation. This can help ensure that the multidomain therapeutic protein coding sequence is inserted in the correct orientation for expression.

[0668] In any of the above methods, the multidomain therapeutic protein nucleic acid construct can be administered simultaneously with the nuclease agent (e.g., CRISPR/Cas system) or not simultaneously (e.g., sequentially in any combination). For example, in a method comprising administering a composition comprising the multidomain therapeutic protein nucleic acid construct and a nuclease agent, they can be administered separately. For example, the multidomain therapeutic protein nucleic acid construct can be administered prior to the nuclease agent, subsequent to the nuclease agent, or at the same time as the nuclease agent. Any suitable methods of administering nucleic acid constructs and nuclease agents to cells can be used, particularly methods of administering to the liver, and examples of such methods are described in more detail elsewhere herein. In methods of treatment or in methods of targeting a cell in vivo in a subject, the nucleic acid construct can be inserted in particular types of cells in the subject. The method and vehicle for introducing the multidomain therapeutic protein nucleic acid construct and/or the nuclease agent into the subject can affect which types of cells in the subject are targeted. In some methods, for example, the nucleic acid construct is inserted into a target genomic locus (e.g., an endogenous ALB locus) in liver cells, such as hepatocytes. Methods and vehicles for introducing such constructs and nuclease agents into the subject (including methods and vehicles that target the liver or hepatocytes, such as lipid nanoparticle-mediated delivery and AAV-mediated delivery (e.g., rAAV8-mediated delivery) and intravenous injection), are disclosed in more detail elsewhere herein.

[0669] In methods in which a compositions comprising a nucleic acid construct (or vector or LNP) and a nuclease agent is administered (i.e., in methods in which a nucleic acid construct (or vector or LNP) and a nuclease agent are both administered), the nucleic acid construct and the nuclease agent can be administered simultaneously. Alternatively, the nucleic acid construct and the nuclease agent can be administered sequentially in any order. For example, the nucleic acid construct can be administered after the nuclease agent, or the nuclease agent can be administered after the nucleic acid construct. For example, the nuclease agent can be administered about 1 hour to about 48 hours, about 1 hour to about 24 hours, about 1 hour to about 12 hours, about 1 hour to about 6 hours, about 1 hour to about 2 hours, about 2 hours to about 48 hours, about 2 hours to about 24 hours, about 2 hours to about 12 hours, about 2 hours to about 6 hours, about 3 hours to about 48 hours, about 6 hours to about 48 hours, about 12 hours to about 48 hours, or about 24 hours to about 48 hours prior to or subsequent to administration of the nucleic acid construct.

[0670] In one example, the nucleic acid construct is administered about 4 hours, about 8 hours, about 12 hours, about 18 hours, about 1 day, about 2 days, about 3 days, about 4 days, about 5 days, about 6 days, or about 1 week prior to administering the nuclease agent. In another example, the nucleic acid construct is administered at least about 4 hours, at least about 8 hours, at least about 12 hours, at least about 18 hours, at least about 1 day, at least about 2 days, at least about 3 days, at least about 4 days, at least about 5 days, at least about 6 days, or at least about 1 week prior to administering the nuclease agent. In another example, the nucleic acid construct is administered about 4 hours to about 24 hours, about 4 hours to about 12 hours, about 4 hours to about 8 hours, about 8 hours to about 24 hours, about 12 hours to about 24 hours, about 1 day to about 7 days, about 1 day to about 6 days, about 1 day to about 5 days, about 1 day to about 4 days, about 1 day to about 3 days, about 1 day to about 2 days, about 2 days to about 7 days, about 3 days to about 7 days, about 4 days to about 7 days, about 5 days to about 7 days, about 6 days to about 7 days, or about 1 day to about 3 days prior to administering the nuclease agent.

[0671] In one example, the nucleic acid construct is administered about 4 hours, about 8 hours, about 12 hours, about 18 hours, about 1 day, about 2 days, about 3 days, about 4 days, about 5 days, about 6 days, or about 1 week after administering the nuclease agent. In another example, the nucleic acid construct is administered at least about 4 hours, at least about 8 hours, at least about 12 hours, at least about 18 hours, at least about 1 day, at least about 2 days, at least about 3 days, at least about 4 days, at least about 5 days, at least about 6 days, or at least about 1 week after administering the nuclease agent. In another example, the nucleic acid construct is administered about 4 hours to about 24 hours, about 4 hours to about 12 hours, about 4 hours to about 8 hours, about 8 hours to about 24 hours, about 12 hours to about 24 hours, about 1 day to about 7 days, about 1 day to about 6 days, about 1 day to about 5 days, about 1 day to about 4 days, about 1 day to about 3 days, about 1 day to about 2 days, about 2 days to about 7 days, about 3 days to about 7 days, about 4 days to about 7 days, about 5 days to about 7 days, about 6 days to about 7 days, or about 1 day to about 3 days after administering the nuclease agent.

[0672] In any of the above methods, the multidomain therapeutic protein nucleic acid construct and the nuclease agent (e.g., CRISPR/Cas system) can be administered using any suitable delivery system and known method. The nuclease agent components and multidomain therapeutic protein nucleic acid construct (e.g., the guide RNA, Cas protein, and multidomain therapeutic protein nucleic acid construct) can be delivered individually or together in any combination, using the same or different delivery methods as appropriate.

[0673] In methods in which a CRISPR/Cas system is used, a guide RNA can be introduced into or administered to a subject or cell, for example, in the form of an RNA (e.g., in vitro transcribed RNA, such as the modified guide RNAs disclosed herein) or in the form of a DNA encoding the guide RNA. When introduced in the form of a DNA, the DNA encoding a guide RNA can be operably linked to a promoter active in the cell or in a cell in the subject. For example, a guide RNA may be delivered via AAV and expressed in vivo under a U6 promoter. Such DNAs can be in one or more expression constructs. For example, such expression constructs can be components of a single nucleic acid molecule. Alternatively, they can be separated in any combination among two or more nucleic acid molecules (i.e., DNAs encoding one or more CRISPR RNAs and DNAs encoding one or more tracrRNAs can be components of a separate nucleic acid molecules).

[0674] Likewise, Cas proteins can be introduced into a subject or cell in any form. For example, a Cas protein can be provided in the form of a protein, such as a Cas protein complexed with a gRNA. Alternatively, a Cas protein can be provided in the form of a nucleic acid encoding the Cas protein, such as an RNA (e.g., messenger RNA (mRNA)), such as a modified mRNA as disclosed herein, or DNA). Optionally, the nucleic acid encoding the Cas protein can be codon optimized for efficient translation into protein in a particular cell or organism. For example, the nucleic acid encoding the Cas protein can be modified to substitute codons having a higher frequency of usage in a mammalian cell, a human cell, a rodent cell, a mouse cell, a rat cell, or any other host cell of interest, as compared to the naturally occurring polynucleotide sequence. When a nucleic acid encoding the Cas protein is introduced into a cell or a subject, the Cas protein can be transiently, conditionally, or constitutively expressed in the cell or in a cell in the subject.

[0675] In one example, the Cas protein is introduced in the form of an mRNA (e.g., a modified mRNA as disclosed herein), and the guide RNA is introduced in the form of RNA such as a modified gRNA as disclosed herein (e.g., together within the same lipid nanoparticle). Guide RNAs can be modified as disclosed elsewhere herein. Likewise, Cas mRNAs can be modified as disclosed elsewhere herein.

[0676] In methods in which a multidomain therapeutic protein nucleic acid construct is inserted following cleavage by a gene-editing system (e.g., a Cas protein), the gene-editing system (e.g., Cas protein) can cleave the target genomic locus to create a single-strand break (nick) or double-strand break, and the cleaved or nicked locus can be repaired by insertion of the multidomain therapeutic protein nucleic acid construct via non-homologous end joining (NHEJ)-mediated insertion or homology-directed repair. Optionally, repair with the multidomain therapeutic protein nucleic acid construct removes or disrupts the guide RNA target sequence(s) so that alleles that have been targeted cannot be re-targeted by the CRISPR/Cas reagents.

[0677] As explained in more detail elsewhere herein, the multidomain therapeutic protein nucleic acid constructs can comprise deoxyribonucleic acid (DNA) or ribonucleic acid (RNA), they can be single-stranded or double-stranded, and they can be in linear or circular form. The multidomain therapeutic protein nucleic acid constructs can be naked nucleic acids or can be delivered by viruses, such as AAV. In a specific example, the multidomain therapeutic protein nucleic acid construct can be delivered via AAV and can be capable of insertion into the target genomic locus (e.g., a safe harbor gene, an ALB gene, or intron 1 of an ALB gene) by non-homologous end joining (e.g., the multidomain therapeutic protein nucleic acid construct can be one that does not comprise a homology arm).

[0678] Some multidomain therapeutic protein nucleic acid constructs are capable of insertion by non-homologous end joining. In some cases, such multidomain therapeutic protein nucleic acid constructs do not comprise a homology arm. For example, such multidomain therapeutic protein nucleic acid constructs can be inserted into a blunt end double-strand break following cleavage with a Cas protein. In a specific example, the multidomain therapeutic protein nucleic acid construct can be delivered via AAV and can be capable of insertion by non-homologous end joining (e.g., the multidomain therapeutic protein nucleic acid construct can be one that does not comprise a homology arm).

[0679] In another example, the multidomain therapeutic protein nucleic acid construct can be inserted via homology-independent targeted integration. For example, the multidomain therapeutic protein nucleic acid construct can be flanked on each side by a guide RNA target sequence (e.g., the same target site as in the target genomic locus, and the CRISPR/Cas reagent (Cas protein and guide RNA) being used to cleave the target site in the target genomic locus). The Cas protein can then cleave the target sites flanking the nucleic acid insert. In a specific example, the multidomain therapeutic protein nucleic acid construct is delivered AAV-mediated delivery, and cleavage of the target sites flanking the nucleic acid insert can remove the inverted terminal repeats (ITRs) of the AAV. In some methods, the target site in the target genomic locus (e.g., a guide RNA target sequence including the flanking protospacer adjacent motif) is no longer present if the nucleic acid insert is inserted into the target genomic locus in the correct orientation but it is reformed if the nucleic acid insert is inserted into the target genomic locus in the opposite orientation.

[0680] The methods disclosed herein can comprise introducing or administering into an subject (e.g., an animal or mammal, such as a human) or cell a multidomain therapeutic protein nucleic acid construct and optionally a nuclease agent such as CRISPR/Cas reagents, including in the form of nucleic acids (e.g., DNA or RNA), proteins, or nucleic-acid-protein complexes. “Introducing” or “administering” includes presenting to the cell or subject the molecule(s) (e.g., nucleic acid(s) or protein(s)) in such a manner that it gains access to the interior of the cell or to the interior of cells within the subject. The introducing can be accomplished by any means, and two or more of the components (e.g., two of the components, or all of the components) can be introduced into the cell or subject simultaneously or sequentially in any combination. For example, a Cas protein can be introduced into a cell or subject before introduction of a guide RNA, or it can be introduced following introduction of the guide RNA. As another example, a multidomain therapeutic protein nucleic acid construct can be introduced prior to the introduction of a Cas protein and a guide RNA, or it can be introduced following introduction of the Cas protein and the guide RNA (e.g., the multidomain therapeutic protein nucleic acid construct can be administered about 1, 2, 3, 4, 8, 12, 24, 36, 48, or 72 hours before or after introduction of the Cas protein and the guide RNA). See, e.g., US 2015/0240263 and US 2015/0110762, each of which is herein incorporated by reference in its entirety for all purposes. In addition, two or more of the components can be introduced into the cell or subject by the same delivery method or different delivery methods. Similarly, two or more of the components can be introduced into a subject by the same route of administration or different routes of administration.

[0681] A guide RNA can be introduced into a subject or cell, for example, in the form of an RNA (e.g., in vitro transcribed RNA) or in the form of a DNA encoding the guide RNA. Guide RNAs can be modified as disclosed elsewhere herein. When introduced in the form of a DNA, the DNA encoding a guide RNA can be operably linked to a promoter active in the cell or in a cell in the subject. For example, a guide RNA may be delivered via AAV and expressed in vivo under a U6 promoter. Such DNAs can be in one or more expression constructs. For example, such expression constructs can be components of a single nucleic acid molecule. Alternatively, they can be separated in any combination among two or more nucleic acid molecules (i.e., DNAs encoding one or more CRISPR RNAs and DNAs encoding one or more tracrRNAs can be components of a separate nucleic acid molecules).

[0682] Likewise, Cas proteins can be provided in any form. For example, a Cas protein can be provided in the form of a protein, such as a Cas protein complexed with a gRNA. Alternatively, a Cas protein can be provided in the form of a nucleic acid encoding the Cas protein, such as an RNA (e.g., messenger RNA (mRNA)) or DNA. Cas RNAs can be modified as disclosed elsewhere herein. Optionally, the nucleic acid encoding the Cas protein can be codon optimized for efficient translation into protein in a particular cell or organism. For example, the nucleic acid encoding the Cas protein can be modified to substitute codons having a higher frequency of usage in a mammalian cell, a human cell, a rodent cell, a mouse cell, a rat cell, or any other host cell of interest, as compared to the naturally occurring polynucleotide sequence. When a nucleic acid encoding the Cas protein is introduced into a cell or a subject, the Cas protein can be transiently, conditionally, or constitutively expressed in the cell or in a cell in the subject.

[0683] Nucleic acids encoding Cas proteins or guide RNAs can be operably linked to a promoter in an expression construct. Expression constructs include any nucleic acid constructs capable of directing expression of a gene or other nucleic acid sequence of interest (e.g., a Cas gene) and which can transfer such a nucleic acid sequence of interest to a target cell. For example, the nucleic acid encoding the Cas protein can be in a vector comprising a DNA encoding one or more gRNAs. Alternatively, it can be in a vector or plasmid that is separate from the vector comprising the DNA encoding one or more gRNAs. Suitable promoters that can be used in an expression construct include promoters active, for example, in one or more of a eukaryotic cell, a human cell, a non-human cell, a mammalian cell, a non-human mammalian cell, a rodent cell, a mouse cell, a rat cell, a hamster cell, a pluripotent cell, an embryonic stem (ES) cell, an adult stem cell, a developmentally restricted progenitor cell, an induced pluripotent stem (iPS) cell, or a one-cell stage embryo. For example, a suitable promoter can be active in a liver cell such as a hepatocyte. Such promoters can be, for example, conditional promoters, inducible promoters, constitutive promoters, or tissue-specific promoters. Optionally, the promoter can be a bidirectional promoter driving expression of both a Cas protein in one direction and a guide RNA in the other direction. Such bidirectional promoters can consist of (1) a complete, conventional, unidirectional Pol III promoter that contains 3 external control elements: a distal sequence element (DSE), a proximal sequence element (PSE), and a TATA box; and (2) a second basic Pol III promoter that includes a PSE and a TATA box fused to the 5′ terminus of the DSE in reverse orientation. For example, in the H1 promoter, the DSE is adjacent to the PSE and the TATA box, and the promoter can be rendered bidirectional by creating a hybrid promoter in which transcription in the reverse direction is controlled by appending a PSE and TATA box derived from the U6 promoter. See, e.g., US 2016/0074535, herein incorporated by references in its entirety for all purposes. Use of a bidirectional promoter to express genes encoding a Cas protein and a guide RNA simultaneously allows for the generation of compact expression cassettes to facilitate delivery. In preferred embodiments, promotors are accepted by regulatory authorities for use in humans. In certain embodiments, promotors drive expression in a liver cell.

[0684] Molecules (e.g., Cas proteins or guide RNAs or nucleic acids encoding) introduced into the subject or cell can be provided in compositions comprising a carrier increasing the stability of the introduced molecules (e.g., prolonging the period under given conditions of storage (e.g., -20° C., 4° C., or ambient temperature) for which degradation products remain below a threshold, such below 0.5% by weight of the starting nucleic acid or protein; or increasing the stability in vivo). Non-limiting examples of such carriers include poly(lactic acid) (PLA) microspheres, poly(D,L-lactic-coglycolic-acid) (PLGA) microspheres, liposomes, micelles, inverse micelles, lipid cochleates, and lipid microtubules.

[0685] Various methods and compositions are provided herein to allow for introduction of molecule (e.g., a nucleic acid or protein) into a cell or subject. Methods for introducing molecules into various cell types are known and include, for example, stable transfection methods, transient transfection methods, and virus-mediated methods.

[0686] Transfection protocols as well as protocols for introducing molecules into cells may vary. Non-limiting transfection methods include chemical-based transfection methods using liposomes; nanoparticles; calcium phosphate (Graham et al. (1973) Virology 52 (2): 456-67, Bacchetti et al. (1977) Proc. Natl. Acad. Sci. U.S.A. 74 (4):1590-4, and Kriegler, M (1991). Transfer and Expression: A Laboratory Manual. New York: W. H. Freeman and Company. pp. 96-97); dendrimers; or cationic polymers such as DEAE-dextran or polyethylenimine. Non-chemical methods include electroporation, sonoporation, and optical transfection. Particle-based transfection includes the use of a gene gun, or magnet-assisted transfection (Bertram (2006) Current Pharmaceutical Biotechnology 7, 277-28). Viral methods can also be used for transfection.

[0687] Introduction of nucleic acids or proteins into a cell can also be mediated by electroporation, by intracytoplasmic injection, by viral infection, by adenovirus, by adeno-associated virus, by lentivirus, by retrovirus, by transfection, by lipid-mediated transfection, or by nucleofection. Nucleofection is an improved electroporation technology that enables nucleic acid substrates to be delivered not only to the cytoplasm but also through the nuclear membrane and into the nucleus. In addition, use of nucleofection in the methods disclosed herein typically requires much fewer cells than regular electroporation (e.g., only about 2 million compared with 7 million by regular electroporation). In one example, nucleofection is performed using the LONZA® NUCLEOFECTOR™ system.

[0688] Introduction of molecules (e.g., nucleic acids or proteins) into a cell (e.g., a zygote) can also be accomplished by microinjection. In zygotes (i.e., one-cell stage embryos), microinjection can be into the maternal and/or paternal pronucleus or into the cytoplasm. If the microinjection is into only one pronucleus, the paternal pronucleus is preferable due to its larger size. Microinjection of an mRNA is preferably into the cytoplasm (e.g., to deliver mRNA directly to the translation machinery), while microinjection of a Cas protein or a polynucleotide encoding a Cas protein or encoding an RNA is preferable into the nucleus/pronucleus. Alternatively, microinjection can be carried out by injection into both the nucleus/pronucleus and the cytoplasm: a needle can first be introduced into the nucleus/pronucleus and a first amount can be injected, and while removing the needle from the one-cell stage embryo a second amount can be injected into the cytoplasm. If a Cas protein is injected into the cytoplasm, the Cas protein preferably comprises a nuclear localization signal to ensure delivery to the nucleus/pronucleus. Methods for carrying out microinjection are well known. See, e.g., Nagy et al. (Nagy A, Gertsenstein M, Vintersten K, Behringer R., 2003, Manipulating the Mouse Embryo. Cold Spring Harbor, New York: Cold Spring Harbor Laboratory Press); see also Meyer et al. (2010) Proc. Natl. Acad. Sci. U.S.A. 107:15022-15026 and Meyer et al. (2012) Proc. Natl. Acad. Sci. U.S.A. 109:9354-9359, each of which is herein incorporated by reference in its entirety for all purposes.

[0689] Other methods for introducing molecules (e.g., nucleic acid or proteins) into a cell or subject can include, for example, vector delivery, particle-mediated delivery, exosome-mediated delivery, lipid-nanoparticle-mediated delivery, cell-penetrating-peptide-mediated delivery, or implantable-device-mediated delivery. As specific examples, a nucleic acid or protein can be introduced into a cell or subject in a carrier such as a poly(lactic acid) (PLA) microsphere, a poly(D,L-lactic-coglycolic-acid) (PLGA) microsphere, a liposome, a micelle, an inverse micelle, a lipid cochleate, or a lipid microtubule. Some specific examples of delivery to a subject include hydrodynamic delivery, virus-mediated delivery (e.g., adeno-associated virus (AAV)-mediated delivery), and lipid-nanoparticle-mediated delivery.

[0690] Introduction of nucleic acids and proteins into cells or subjects can be accomplished by hydrodynamic delivery (HDD). For gene delivery to parenchymal cells, only essential DNA sequences need to be injected via a selected blood vessel, eliminating safety concerns associated with current viral and synthetic vectors. When injected into the bloodstream, DNA is capable of reaching cells in the different tissues accessible to the blood. Hydrodynamic delivery employs the force generated by the rapid injection of a large volume of solution into the incompressible blood in the circulation to overcome the physical barriers of endothelium and cell membranes that prevent large and membrane-impermeable compounds from entering parenchymal cells. In addition to the delivery of DNA, this method is useful for the efficient intracellular delivery of RNA, proteins, and other small compounds in vivo. See, e.g., Bonamassa et al. (2011) Pharm. Res. 28(4):694-701, herein incorporated by reference in its entirety for all purposes.

[0691] Introduction of nucleic acids can also be accomplished by virus-mediated delivery, such as AAV-mediated delivery or lentivirus-mediated delivery. Other exemplary viruses/viral vectors include retroviruses, adenoviruses, vaccinia viruses, poxviruses, and herpes simplex viruses. The viruses can infect dividing cells, non-dividing cells, or both dividing and non-dividing cells. The viruses can integrate into the host genome or alternatively do not integrate into the host genome. Such viruses can also be engineered to have reduced immunity. The viruses can be replication-competent or can be replication-defective (e.g., defective in one or more genes necessary for additional rounds of virion replication and/or packaging). Viruses can cause transient expression or longer-lasting expression. Viral vector may be genetically modified from their wild type counterparts. For example, the viral vector may comprise an insertion, deletion, or substitution of one or more nucleotides to facilitate cloning or such that one or more properties of the vector is changed. Such properties may include packaging capacity, transduction efficiency, immunogenicity, genome integration, replication, transcription, and translation. In some examples, a portion of the viral genome may be deleted such that the virus is capable of packaging exogenous sequences having a larger size. In some examples, the viral vector may have an enhanced transduction efficiency. In some examples, the immune response induced by the virus in a host may be reduced. In some examples, viral genes (such as integrase) that promote integration of the viral sequence into a host genome may be mutated such that the virus becomes non-integrating. In some examples, the viral vector may be replication defective. In some examples, the viral vector may comprise exogenous transcriptional or translational control sequences to drive expression of coding sequences on the vector. In some examples, the virus may be helper-dependent. For example, the virus may need one or more helper virus to supply viral components (such as viral proteins) required to amplify and package the vectors into viral particles. In such a case, one or more helper components, including one or more vectors encoding the viral components, may be introduced into a host cell or population of host cells along with the vector system described herein. In other examples, the virus may be helper-free. For example, the virus may be capable of amplifying and packaging the vectors without a helper virus. In some examples, the vector system described herein may also encode the viral components required for virus amplification and packaging.

[0692] Exemplary viral titers (e.g., AAV titers) include about 10¹² to about 10¹⁶ vg/mL. Other exemplary viral titers (e.g., AAV titers) include about 10¹² to about 10¹⁶ vg/kg of body weight.

[0693] Introduction of nucleic acids and proteins can also be accomplished by lipid nanoparticle (LNP)-mediated delivery. For example, LNP-mediated delivery can be used to deliver a combination of Cas mRNA and guide RNA or a combination of Cas protein and guide RNA. LNP-mediated delivery can be used to deliver a guide RNA in the form of RNA. In a specific example, the guide RNA and the Cas protein are each introduced in the form of RNA via LNP-mediated delivery in the same LNP. As discussed in more detail elsewhere herein, one or more of the RNAs can be modified. For example, guide RNAs can be modified to comprise one or more stabilizing end modifications at the 5′ end and/or the 3′ end. Such modifications can include, for example, one or more phosphorothioate linkages at the 5′ end and/or the 3′ end or one or more 2′-O-methyl modifications at the 5′ end and/or the 3′ end. As another example, Cas mRNA modifications can include substitution with pseudouridine (e.g., fully substituted with pseudouridine), 5′ caps, and polyadenylation. As another example, Cas mRNA modifications can include substitution with N1-methyl-pseudouridine (e.g., fully substituted with N1-methyl-pseudouridine), 5′ caps, and polyadenylation. Other modifications are also contemplated as disclosed elsewhere herein. Delivery through such methods can result in transient Cas expression and/or transient presence of the guide RNA, and the biodegradable lipids improve clearance, improve tolerability, and decrease immunogenicity. Lipid formulations can protect biological molecules from degradation while improving their cellular uptake. Lipid nanoparticles are particles comprising a plurality of lipid molecules physically associated with each other by intermolecular forces. These include microspheres (including unilamellar and multilamellar vesicles, e.g., liposomes), a dispersed phase in an emulsion, micelles, or an internal phase in a suspension. Such lipid nanoparticles can be used to encapsulate one or more nucleic acids or proteins for delivery. Formulations which contain cationic lipids are useful for delivering polyanions such as nucleic acids. Other lipids that can be included are neutral lipids (i.e., uncharged or zwitterionic lipids), anionic lipids, helper lipids that enhance transfection, and stealth lipids that increase the length of time for which nanoparticles can exist in vivo. Examples of suitable cationic lipids, neutral lipids, anionic lipids, helper lipids, and stealth lipids can be found in WO 2016/010840 A1 and WO2017/173054 A1, each of which is herein incorporated by reference in its entirety for all purposes. An exemplary lipid nanoparticle can comprise a cationic lipid and one or more other components. In one example, the other component can comprise a helper lipid such as cholesterol. In another example, the other components can comprise a helper lipid such as cholesterol and a neutral lipid such as DSPC. In another example, the other components can comprise a helper lipid such as cholesterol, an optional neutral lipid such as DSPC, and a stealth lipid such as S010, S024, S027, S031, or S033.

[0694] The LNP may contain one or more or all of the following: (i) a lipid for encapsulation and for endosomal escape; (ii) a neutral lipid for stabilization; (iii) a helper lipid for stabilization; and (iv) a stealth lipid. See, e.g., Finn et al. (2018) Cell Rep. 22(9):2227-2235 and WO 2017/173054 A1, each of which is herein incorporated by reference in its entirety for all purposes. In certain LNPs, the cargo can include a guide RNA or a nucleic acid encoding a guide RNA. In certain LNPs, the cargo can include an mRNA encoding a Cas nuclease, such as Cas9, and a guide RNA or a nucleic acid encoding a guide RNA. In certain LNPs, the cargo can include a multidomain therapeutic protein nucleic acid construct. In certain LNPs, the cargo can include an mRNA encoding a Cas nuclease, such as Cas9, a guide RNA or a nucleic acid encoding a guide RNA, and a multidomain therapeutic protein nucleic acid construct. LNPs for use in the methods are described in more detail elsewhere herein.

[0695] The mode of delivery can be selected to decrease immunogenicity. For example, a Cas protein and a gRNA may be delivered by different modes (e.g., bi-modal delivery). These different modes may confer different pharmacodynamics or pharmacokinetic properties on the subject delivered molecule (e.g., Cas or nucleic acid encoding, gRNA or nucleic acid encoding, or multidomain therapeutic protein nucleic acid construct). For example, the different modes can result in different tissue distribution, different half-life, or different temporal distribution. Some modes of delivery (e.g., delivery of a nucleic acid vector that persists in a cell by autonomous replication or genomic integration) result in more persistent expression and presence of the molecule, whereas other modes of delivery are transient and less persistent (e.g., delivery of an RNA or a protein). Delivery of Cas proteins in a more transient manner, for example as mRNA or protein, can ensure that the Cas/gRNA complex is only present and active for a short period of time and can reduce immunogenicity caused by peptides from the bacterially-derived Cas enzyme being displayed on the surface of the cell by MHC molecules. Such transient delivery can also reduce the possibility of off-target modifications.

[0696] Administration in vivo can be by any suitable route including, for example, systemic routes of administration such as parenteral administration, e.g., intravenous, subcutaneous, intraarterial, or intramuscular. In a specific example, administration in vivo is intravenous.

[0697] Compositions comprising the guide RNAs and/or Cas proteins (or nucleic acids encoding the guide RNAs and/or Cas proteins) can be formulated using one or more physiologically and pharmaceutically acceptable carriers, diluents, excipients or auxiliaries. The formulation can depend on the route of administration chosen. Pharmaceutically acceptable means that the carrier, diluent, excipient, or auxiliary is compatible with the other ingredients of the formulation and not substantially deleterious to the recipient thereof. In a specific example, the route of administration and/or formulation or chosen for delivery to the liver (e.g., hepatocytes).

[0698] The methods disclosed herein can increase multidomain therapeutic protein or GAA protein levels and/or multidomain therapeutic protein or GAA activity levels in a cell or subject (e.g., circulating, serum, or plasma levels in a subject) and can comprise measuring multidomain therapeutic protein or GAA protein levels and/or multidomain therapeutic protein or GAA activity levels in a cell or subject (e.g., circulating, serum, or plasma levels in a subject). In one example, the methods result in increased expression of the multidomain therapeutic protein in the subject compared to a method comprising administering an episomal expression vector encoding the multidomain therapeutic protein. For example, the methods can result in increased serum levels of the multidomain therapeutic protein in the subject compared to a method comprising administering an episomal expression vector encoding the multidomain therapeutic protein. The methods can also result in increased multidomain therapeutic protein activity or GAA activity in the subject compared to a method comprising administering an episomal expression vector encoding the multidomain therapeutic protein. Levels of circulating multidomain therapeutic protein or GAA activity can be measured by using well-known methods.

[0699] In some methods, GAA activity and/or expression levels in a subject are increased to about or at least about 2%, about or at least about 10%, about or at least about 25%, about or at least about 40%, about or at least about 50%, about or at least about 75%, or at least about 100%, or more, of normal level. In some methods, GAA activity and/or expression levels in a subject are increased to about or at least about 40%, about or at least about 50%, about or at least about 75%, or at least about 100%, or more, of normal level. In certain embodiments, the level of expression or activity is measured in a cell or tissue in which a sign or symptom of the GAA loss of function is present. For example, when the loss of function results in muscle dysfunction, the level or activity of the multidomain therapeutic protein or GAA is measured in a muscle cell. It is understood that depending on the exogenous protein, the level of activity of the multidomain therapeutic protein may not compare 1:1 with a native GAA protein based on weight. In such embodiment, the relative activity of the multidomain therapeutic protein and the native GAA can be compared. In certain embodiments, the loss of function is nearly complete such that a relative activity cannot be determined. In certain embodiments, the comparison is made to an appropriate control subject. Selection of an appropriate control subject is within the ability of those of skill in the art. In certain embodiments, the level of expression is sufficient to treat at least one sign or symptom resulting from the loss of function of the GAA. GAA activity can be assessed by any known method. For example, to assess GAA activity (or deficiencies of activity), blood-based assays can measure GAA activity in dried blood spots or fresh blood. GAA activity can also be measured in fibroblasts from a skin biopsy or muscle biopsy. Other secondary measures can be measuring urine glucose tetrasaccharides by mass spectrometry.

[0700] In some methods, circulating multidomain therapeutic protein levels (i.e., serum levels) are about or at least about 0.5, about or at least about 1, about or at least about 2, about or at least about 3, about or at least about 4, about or at least about 5, about or at least about 6, about or at least about 7, about or at least about 8, about or at least about 9, or about or at least about 10 µg/mL. In some methods, multidomain therapeutic protein levels are at least about 1 µg/mL or about 1 µg/mL. In some methods, multidomain therapeutic protein levels are at least about 2 µg/mL or about 2 µg/mL. In some methods, multidomain therapeutic protein levels are at least about 5 µg/mL or about 5 µg/mL. In some methods, multidomain therapeutic protein levels are about 1 µg/mL to about 30 µg/mL, about 2 µg/mL to about 30 µg/mL, about 3 µg/mL to about 30 µg/mL, about 4 µg/mL to about 30 µg/mL, about 5 µg/mL to about 30 µg/mL, about 1 µg/mL to about 20 µg/mL, about 2 µg/mL to about 20 µg/mL, about 3 µg/mL to about 20 µg/mL, about 4 µg/mL to about 20 µg/mL, about 5 µg/mL to about 20 µg/mL. For example, the method can result in multidomain therapeutic protein levels of about 2 µg/mL to about 30 µg/mL or 2 µg/mL to about 20 µg/mL. For example, the method can result in multidomain therapeutic protein levels of about 5 µg/mL to about 30 µg/mL or 5 µg/mL to about 20 µg/mL. In some embodiments, the recited expression levels are at least 1 month after administration. In some embodiments, the recited expression levels are at least 2 months after administration. In some embodiments, the recited expression levels are at least 3 months after administration. In some embodiments, the recited expression levels are at least 4 months after administration. In some embodiments, the recited expression levels are at least 5 months after administration. In some embodiments, the recited expression levels are at least 6 months after administration. In some embodiments, the recited expression levels are at least 9 months after administration. In some embodiments, the recited expression levels are at least 12 months after administration.

[0701] In some methods, the method increases expression and/or activity of GAA or the multidomain therapeutic protein over the subject’s baseline expression and/or activity (i.e., expression and/or activity prior to administration). In some methods, the method increases expression and/or activity of GAA over the subject’s baseline expression and/or activity (i.e., expression and/or activity prior to administration. In some methods, GAA activity and/or GAA expression or serum levels in a subject are increased by about or at least about 10%, about or at least about 25%, about or at least about 50%, about or at least about 75%, or about or at least about 100%, or more, as compared to the subject’s GAA expression or serum levels and/or activity (e.g., GAA activity) before administration (i.e., the subject’s baseline levels). It is understood that depending on the multidomain therapeutic protein, the level of activity of the multidomain therapeutic protein may not compare 1:1 with a native protein based on weight. In such embodiment, the relative activity of the multidomain therapeutic protein and the native GAA can be compared. In certain embodiments, the loss of function is nearly complete such that a relative activity cannot be determined. In certain embodiments, the level of expression is sufficient to treat at least one sign or symptom resulting from the loss of function of the GAA.

[0702] In some methods, the method increases expression and/or activity of the multidomain therapeutic protein over the cell’s baseline expression and/or activity (i.e., expression and/or activity prior to administration). In some methods, the method increases expression and/or activity of GAA over the cell’s baseline expression and/or activity (i.e., expression and/or activity prior to administration. In some methods, GAA activity and/or expression levels in a cell or population of cells (e.g., liver cells, or hepatocytes) are increased by about or at least about 10%, about or at least about 25%, about or at least about 50%, about or at least about 75%, about or at least about 100%, or more, as compared to the GAA activity and/or expression levels before administration (i.e., the subject’s baseline levels). It is understood that depending on the multidomain therapeutic protein, the level of activity of the multidomain therapeutic protein may not compare 1:1 with a native GAA protein based on weight. In such embodiment, the relative activity of the multidomain therapeutic protein and the native GAA protein can be compared. In certain embodiments, the GAA loss of function is nearly complete such that a relative activity cannot be determined. In certain embodiments, the level of expression is sufficient to treat at least one sign or symptom resulting from the loss of function of the GAA.

[0703] In a specific example, the GAA activity levels in a subject are increased to no more than about 300%, no more than about 250%, no more than about 200%, or no more than about 150% of normal GAA activity levels.

[0704] In a specific example, the GAA activity levels in the subject are increased to at least about 1%, at least about 5%, at least about 10%, at least about 15%, at least about 20%, at least about 25%, at least about 30%, at least about 35%, at least about 40%, at least about 45%, at least about 50%, at least about 55%, at least about 60%, at least about 65%, at least about 70%, at least about 75%, at least about 80%, at least about 85%, at least about 90%, or at least about 100% of normal GAA activity levels. In a specific example, the GAA activity levels in the subject are increased to at least about 40%, at least about 45%, at least about 50%, at least about 55%, at least about 60%, at least about 65%, at least about 70%, at least about 75%, at least about 80%, at least about 85%, at least about 90%, or at least about 100% of normal GAA activity levels.

[0705] In a specific example, a subject has infantile-onset Pompe disease (e.g., classic infantile-onset Pompe disease), and the GAA activity levels in the subject are increased to at least about 1%, at least about 5%, at least about 10%, at least about 15%, at least about 20%, at least about 25%, at least about 30%, at least about 35%, at least about 40%, at least about 45%, at least about 50%, at least about 55%, at least about 60%, at least about 65%, at least about 70%, at least about 75%, at least about 80%, at least about 85%, at least about 90%, or at least about 100% of normal GAA activity levels. In a specific example, a subject has infantile-onset Pompe disease (e.g., classic infantile-onset Pompe disease), and the GAA activity levels in the subject are increased to at least about 40%, at least about 45%, at least about 50%, at least about 55%, at least about 60%, at least about 65%, at least about 70%, at least about 75%, at least about 80%, at least about 85%, at least about 90%, or at least about 100% of normal GAA activity levels.

[0706] In a specific example, a subject has infantile-onset Pompe disease (e.g., classic or non-classic infantile-onset Pompe disease), and the GAA activity levels in the subject are increased to at least about 2% at least about 5%, at least about 10%, at least about 15%, at least about 20%, at least about 25%, at least about 30%, at least about 35%, at least about 40%, at least about 45%, at least about 50%, at least about 55%, at least about 60%, at least about 65%, at least about 70%, at least about 75%, at least about 80%, at least about 85%, at least about 90%, or at least about 100% of normal GAA activity levels (e.g., at least about 10%, at least about 15%, at least about 20%, at least about 25%, at least about 30%, at least about 35%, at least about 40%, at least about 45%, at least about 50%, at least about 55%, at least about 60%, at least about 65%, at least about 70%, at least about 75%, at least about 80%, at least about 85%, at least about 90%, or at least about 100% of normal GAA activity levels). In a specific example, a subject has infantile-onset Pompe disease (e.g., classic or non-classic infantile-onset Pompe disease), and the GAA activity levels in the subject are increased to at least about 40%, at least about 45%, at least about 50%, at least about 55%, at least about 60%, at least about 65%, at least about 70%, at least about 75%, at least about 80%, at least about 85%, at least about 90%, or at least about 100% of normal GAA activity levels.

[0707] In a specific example, a subject has late-onset Pompe disease, and the GAA activity levels in the subject are increased to at least about 2% at least about 5%, at least about 10%, at least about 15%, at least about 20%, at least about 25%, at least about 30%, at least about 35%, at least about 40%, at least about 45%, at least about 50%, at least about 55%, at least about 60%, at least about 65%, at least about 70%, at least about 75%, at least about 80%, at least about 85%, at least about 90%, or at least about 100% of normal GAA activity levels (e.g., at least about 40%, at least about 45%, at least about 50%, at least about 55%, at least about 60%, at least about 65%, at least about 70%, at least about 75%, at least about 80%, at least about 85%, at least about 90%, or at least about 100% of normal GAA activity levels).

[0708] In a specific example, a subject has infantile-onset Pompe disease (e.g., classic infantile-onset Pompe disease), and the GAA activity levels in the subject are increased to more than about 1%, more than about 5%, more than about 10%, more than about 15%, more than about 20%, more than about 25%, more than about 30%, more than about 35%, more than about 40%, more than about 45%, more than about 50%, more than about 55%, more than about 60%, more than about 65%, more than about 70%, more than about 75%, more than about 80%, more than about 85%, more than about 90%, or more than about 100% of normal GAA activity levels. In a specific example, a subject has infantile-onset Pompe disease (e.g., classic infantile-onset Pompe disease), and the GAA activity levels in the subject are increased to more than about 40%, more than about 45%, more than about 50%, more than about 55%, more than about 60%, more than about 65%, more than about 70%, more than about 75%, more than about 80%, more than about 85%, more than about 90%, or more than about 100% of normal GAA activity levels

[0709] In a specific example, a subject has infantile-onset Pompe disease (e.g., classic or non-classic infantile-onset Pompe disease), and the GAA activity levels in the subject are increased to more than about 2% more than about 5%, more than about 10%, more than about 15%, more than about 20%, more than about 25%, more than about 30%, more than about 35%, more than about 40%, more than about 45%, more than about 50%, more than about 55%, more than about 60%, more than about 65%, more than about 70%, more than about 75%, more than about 80%, more than about 85%, more than about 90%, or more than about 100% of normal GAA activity levels (e.g., more than about 10%, more than about 15%, more than about 20%, more than about 25%, more than about 30%, more than about 35%, more than about 40%, more than about 45%, more than about 50%, more than about 55%, more than about 60%, more than about 65%, more than about 70%, more than about 75%, more than about 80%, more than about 85%, more than about 90%, or more than about 100% of normal GAA activity levels). In a specific example, a subject has infantile-onset Pompe disease (e.g., classic or non-classic infantile-onset Pompe disease), and the GAA activity levels in the subject are increased to more than about 40%, more than about 45%, more than about 50%, more than about 55%, more than about 60%, more than about 65%, more than about 70%, more than about 75%, more than about 80%, more than about 85%, more than about 90%, or more than about 100% of normal GAA activity levels.

[0710] In a specific example, a subject has late-onset Pompe disease, and the GAA activity levels in the subject are increased to more than about 2% more than about 5%, more than about 10%, more than about 15%, more than about 20%, more than about 25%, more than about 30%, more than about 35%, more than about 40%, more than about 45%, more than about 50%, more than about 55%, more than about 60%, more than about 65%, more than about 70%, more than about 75%, more than about 80%, more than about 85%, more than about 90%, or more than about 100% of normal GAA activity levels (e.g., more than about 40%, more than about 45%, more than about 50%, more than about 55%, more than about 60%, more than about 65%, more than about 70%, more than about 75%, more than about 80%, more than about 85%, more than about 90%, or more than about 100% of normal GAA activity levels).

[0711] In some methods, the method results in increased expression of the multidomain therapeutic protein in the subject (e.g., neonatal subject) compared to a method comprising administering an episomal expression vector encoding the polypeptide of interest in a control subject. In some methods, the method results in increased serum levels of the multidomain therapeutic protein in the subject (e.g., neonatal subject) compared to a method comprising administering an episomal expression vector encoding the polypeptide of interest to a control subject.

[0712] In some methods, the method increases expression or activity of the multidomain therapeutic protein or GAA over the subject’s (e.g., neonatal subject’s) baseline expression or activity of the multidomain therapeutic protein or GAA (i.e., any percent change in expression that is larger than typical error bars). In some methods, the method results in expression of the multidomain therapeutic protein or GAA at a detectable level above zero, e.g., at a statistically significant level, a clinically relevant level .

[0713] Some methods comprise achieving a durable or sustained effect in a human, such as an at least at least 8 weeks, at least 24 weeks, for example, at least 1 year, or optionally at least 2 year effect, and in some embodiments, at least 3 year, at least 4 year, or at least 5 year effect. Some methods comprise achieving the therapeutic effect in a human in a durable and sustained manner, such as an at least 8 weeks, at least 24 weeks, for example, at least 1 year, or optionally at least 2 year effect, and in some embodiments, at least 3 year, at least 4 year, or at least 5 year effect. In some methods, the increased multidomain therapeutic protein or GAA activity and/or expression level in a human is stable for at least at least 8 weeks, at least 24 weeks, for example, at least 1 year, optionally at least 2 years, and in some embodiments, at least 3 years, at least 4 years, or at least 5 years. In some methods, a steady-state activity and/or level of multidomain therapeutic protein or GAA in a human is achieved by at least 7 days, at least 14 days, or at least 28 days, optionally at least 56 days, at least 80 days, or at least 96 days. In additional methods, the method comprises maintaining multidomain therapeutic protein or GAA activity and/or levels after a single dose in a human for at least 8 weeks, at least 16 weeks, or at least 24 week, or in some embodiments at least 1 year, or at least 2 years, optionally at least 3 years, at least 4 years, or at least 5 years. For example, expression of the multidomain therapeutic protein or GAA can be sustained in the human subject for at least about 8 weeks, at least about 12 weeks, at least about 24 weeks, in certain embodiments, at least about 1 year, or at least about 2 years after treatment, and in some embodiments, at least 3 years, at least 4 years, or at least 5 years after treatment. Likewise, activity of the multidomain therapeutic protein or GAA can be sustained in the human subject for at least about 8 weeks, at least about 12 weeks, at least about 24 weeks, in certain embodiments for at least about 1 year, or at least about 2 years after treatment, and in some embodiments, at least 3 years, at least 4 years, or at least 5 years after treatment. In some methods, expression or activity of the multidomain therapeutic protein or GAA is maintained at a level higher than the expression or activity of the multidomain therapeutic protein or GAA prior to treatment (i.e., the subject’s baseline). In some methods, expression or activity of the multidomain therapeutic protein or GAA is considered sustained if it is maintained at a therapeutically effective level of expression or activity. Relative durations, in other organisms, are understood based, e.g., on life span and developmental stages, are covered within the disclosure above. In some methods, expression or activity of the multidomain therapeutic protein or GAA is considered “sustained” if the expression or activity in a human at six months after administration, one year after administration, or two years after administration, the expression or activity is at least 50% of the expression or activity of the peak level of expression or activity measured for that subject. In certain embodiments, at six months, e.g., at 24 weeks to 28 weeks, after administration the expression or activity is at least 50%, 55%, 60%, 65%, 70%, 75% or 80% of the expression or activity of the peak level of expression or activity measured for that subject. In certain embodiments, at one year, i.e., about 12 months, e.g., at 11-13 months, after administration the expression or activity is at least 50%, 55%, 60%, 65%, 70%, 75% or 80% of the expression or activity of the peak level of expression or activity measured for that subject. In certain embodiments, at two years, i.e., about 24 months, e.g., at 23-25 months, after administration the expression or activity is at least 50%, 55%, 60%, 65%, 70%, 75% or 80% of the expression or activity of the peak level of expression or activity measured for that subject. In certain embodiments, at six months after administration the expression or activity is at least 50%, preferably at least 60% of the expression or activity of the peak level of expression or activity measured for that subject. In certain embodiments, at one year after administration the expression or activity is at least 50%, preferably at least 60% of the expression or activity of the peak level of expression or activity measured for that subject. In certain embodiments, at two years after administration the expression or activity is at least 50%, preferably at least 60% of the expression or activity of the peak level of expression or activity measured for that subject. In preferred embodiments, the subject has routine monitoring of expression or activity levels of the polypeptide, e.g., weekly, monthly, particularly early after administration, e.g., within the first six months. Periodic measurements may establish that the effect on expression or activity is sustained at, e.g. 6 months after administration, one year after administration, or two years after administration. In some methods in neonatal subjects, the expression of the multidomain therapeutic protein or GAA is sustained when the neonatal subject becomes an adult. In some methods, the expression of the multidomain therapeutic protein or GAA is sustained for the lifetime of the subject or neonatal subject.

[0714] In some methods, the expression or activity of the multidomain therapeutic protein is at least 50% of the expression or activity of the multidomain therapeutic protein at a peak level of expression measured for the subject at 24 weeks after the administering. In some methods, the expression or activity of the multidomain therapeutic protein is at least 50% of the expression or activity of the multidomain therapeutic protein at a peak level of expression measured for the subject at one year after the administering. In some methods, the expression or activity of the multidomain therapeutic protein is at least 60% of the expression or activity of the multidomain therapeutic protein at a peak level of expression measured for the subject at 24 weeks after the administering. In some methods, the expression or activity of the multidomain therapeutic protein is at least 50% of the expression or activity of the multidomain therapeutic protein at a peak level of expression measured for the subject at two years after the administering. In some methods, the expression or activity of the multidomain therapeutic protein is at least 60% of the expression or activity of the multidomain therapeutic protein at a peak level of expression measured for the subject at 2 years after the administering. In some methods, the expression or activity of the multidomain therapeutic protein is at least 60% of the expression or activity of the multidomain therapeutic protein at a peak level of expression measured for the subject at 24 weeks after the administering.

[0715] In some methods involving insertion into an ALB locus, the subject’s circulating albumin levels or cell’s albumin levels are normal. Such methods may comprise maintaining the subject’s circulating albumin levels or the cell’s albumin levels within ±5%, ±10%, ±15%, ±20%, or ±50% of normal circulating albumin levels or normal albumin levels. In some methods, the subject’s or cell’s albumin levels are unchanged as compared to the albumin levels of untreated individuals by at least week 4, at least week 8, at least week 12, or at least week 20. In some methods, the subject’s or cell’s albumin levels transiently drop and then return to normal levels. In particular, the methods may comprise detecting no significant alterations in levels of plasma albumin.

[0716] In some methods, the method further comprises assessing preexisting anti-GAA immunity in a subject prior to administering any of the nucleic acid constructs described herein. For example, such methods could comprise assessing immunogenicity using a total antibody (TAb) immune assay or a neutralizing antibody (NAb) assay. In some methods, the subject has not previously been administered recombinant GAA protein.

[0717] In some methods, the method further comprises assessing preexisting anti-AAV (e.g., anti-AAV8) immunity in a subject prior to administering any of the nucleic acid constructs described herein. For example, such methods could comprise assessing immunogenicity using a total antibody (TAb) immune assay or a neutralizing antibody (NAb) assay. See, e.g., Manno et al. (2006) Nat. Med. 12(3):342-347, Kruzik et al. (2019) Mol. Ther. Methods Clin. Dev. 14:126-133, and Weber (2021) Front. Immunol. 12:658399, each of which is herein incorporated by reference in its entirety for all purposes. In some embodiments, TAb assays look for antibodies that bind to the AAV vector, whereas NAb assays assess whether the antibodies that are present stop the AAV vector from transducing target cells. With TAb assays, the drug product or an empty capsid can be used to capture the antibodies; NAb assays can require a reporter vector (e.g., a version of the AAV vector encoding luciferase).

[0718] All patent filings, websites, other publications, accession numbers and the like cited above or below are incorporated by reference in their entirety for all purposes to the same extent as if each individual item were specifically and individually indicated to be so incorporated by reference. If different versions of a sequence are associated with an accession number at different times, the version associated with the accession number at the effective filing date of this application is meant. The effective filing date means the earlier of the actual filing date or filing date of a priority application referring to the accession number if applicable. Likewise, if different versions of a publication, website or the like are published at different times, the version most recently published at the effective filing date of the application is meant unless otherwise indicated. Any feature, step, element, embodiment, or aspect of the invention can be used in combination with any other unless specifically indicated otherwise. Although the present invention has been described in some detail by way of illustration and example for purposes of clarity and understanding, it will be apparent that certain changes and modifications may be practiced within the scope of the appended claims.

### BRIEF DESCRIPTION OF THE SEQUENCES

[0719] The nucleotide and amino acid sequences listed in the accompanying sequence listing are shown using standard letter abbreviations for nucleotide bases, and three-letter code for amino acids. The nucleotide sequences follow the standard convention of beginning at the 5′ end of the sequence and proceeding forward (i.e., from left to right in each line) to the 3′ end. Only one strand of each nucleotide sequence is shown, but the complementary strand is understood to be included by any reference to the displayed strand. When a nucleotide sequence encoding an amino acid sequence is provided, it is understood that codon degenerate variants thereof that encode the same amino acid sequence are also provided. The amino acid sequences follow the standard convention of beginning at the amino terminus of the sequence and proceeding forward (i.e., from left to right in each line) to the carboxy terminus.

TABLE 9

Description of Sequences

| SEQ ID NO | Type | Description |
|---|---|---|
| 1 | RNA | Cas9 mRNA |
| 2 | RNA | Cas9 mRNA CDS |
| 3 | DNA | Cas9 CDS |
| 4 | DNA | Human ALB Intron 1 |
| 5 | DNA | Guide RNA Target Sequence Plus PAM v1 |
| 6 | DNA | Guide RNA Target Sequence Plus PAM v2 |
| 7 | DNA | Guide RNA Target Sequence Plus PAM v3 |
| 8 | Protein | SpCas9 Protein V1 |
| 9 | DNA | SpCas9 DNA V1 |
| 10 | DNA | SpCas9 mRNA (cDNA) |
| 11 | Protein | SpCas9 Protein V2 |
| 12 | RNA | SpCas9 mRNA V2 |
| 13 | Protein | SV40 NLS v1 |
| 14 | Protein | SV40 NLS v2 |
| 15 | Protein | Nucleoplasmin NLS |
| 16 | RNA | crRNA Tail v1 |
| 17 | RNA | crRNA Tail v2 |
| 18 | RNA | TracrRNA v1 |
| 19 | RNA | TracrRNA v2 |
| 20 | RNA | TracrRNA v3 |
| 21 | RNA | gRNA Scaffold v1 |
| 22 | RNA | gRNA Scaffold v2 |
| 23 | RNA | gRNA Scaffold v3 |
| 24 | RNA | gRNA Scaffold v4 |
| 25 | RNA | gRNA Scaffold v5 |
| 26 | RNA | gRNA Scaffold v6 |
| 27 | RNA | gRNA Scaffold v7 |
| 28 | RNA | gRNA Scaffold v8 |
| 29 | RNA | Modified gRNA Scaffold |
| 30-61 | RNA | Human ALB Intron 1 Guide Sequences |
| 62-125 | RNA | Human ALB Intron 1 sgRNA Sequences |
| 126-157 | DNA | Human ALB Intron 1 Guide RNA Target Sequences |
| 158 | DNA | ITR 145 |
| 159 | DNA | ITR 141 |
| 160 | DNA | ITR 130 |
| 161 | DNA | SV40 polyA |
| 162 | DNA | bGH polyA |
| 163 | DNA | Mouse Alb exon 2 Splice Acceptor |
| 164 | RNA | Mouse Alb Intron 1 Guide Sequence g666 |
| 165 | DNA | Mouse Alb Intron 1 Guide RNA Target Sequence g666 |
| 166-167 | RNA | Mouse Alb Intron 1 sgRNA Sequences g666 |
| 168 | DNA | ITR 145 Reverse Complement |
| 169 | DNA | SV40 polyA v2 |
| 170 | Protein | Human GAA Protein (NP 000143.2) |
| 171 | DNA | Human GAA cDNA/mRNA (NM 000152.5) |
| 172 | DNA | Human GAA CDS (CCDS32760.1) |
| 173 | Protein | Human GAA (70-952) Protein |
| 174 | DNA | Human GAA (70-952) CDS |
| 175 | DNA | Human GAA (70-952) CDS - DC-0 |
| 176 | DNA | Human GAA (70-952) CDS - GA-0 |
| 177 | DNA | Human GAA (70-952) CDS - GS-0 |
| 178 | DNA | Human GAA (70-952) CDS - GS-0v2 |
| 179 | DNA | Human GAA (70-952) CDS - GS-1 |
| 180 | DNA | Human GAA (70-952) CDS - GS-44 |
| 181 | DNA | Human GAA (70-952) CDS - GS-50 |
| 182 | DNA | Human GAA (70-952) CDS - RE-8 |
| 183 | Protein | 12450 anti-CD63 scFv |
| 184 | DNA | 12450 anti-CD63 scFv CDS |
| 185 | DNA | 12450 anti-CD63 scFv CDS - DC-0 |
| 186 | DNA | 12450 anti-CD63 scFv CDS - GA-0 |
| 187 | DNA | 12450 anti-CD63 scFv CDS - GS-0 |
| 188 | DNA | 12450 anti-CD63 scFv CDS - GS-0v2 |
| 189 | DNA | 12450 anti-CD63 scFv CDS - GS-1 |
| 190 | DNA | 12450 anti-CD63 scFv CDS - GS-44 |
| 191 | DNA | 12450 anti-CD63 scFv CDS - GS-50 |
| 192 | DNA | 12450 anti-CD63 scFv CDS - RE-8 |
| 193 | Protein | 12450 anti-CD63 scFv:GAA (70-952) Fusion Protein |
| 194 | DNA | 12450 anti-CD63 scFv:GAA (70-952) Fusion Protein CDS |
| 195 | DNA | 12450 anti-CD63 scFv:GAA (70-952) Fusion Protein CDS - DC-0 |
| 196 | DNA | 12450 anti-CD63 scFv:GAA (70-952) Fusion Protein CDS - GA-0 |
| 197 | DNA | 12450 anti-CD63 scFv:GAA (70-952) Fusion Protein CDS - GS-0 |
| 198 | DNA | 12450 anti-CD63 scFv:GAA (70-952) Fusion Protein CDS - GS-0v2 |
| 199 | DNA | 12450 anti-CD63 scFv:GAA (70-952) Fusion Protein CDS - GS-1 |
| 200 | DNA | 12450 anti-CD63 scFv:GAA (70-952) Fusion Protein CDS - GS-44 |
| 201 | DNA | 12450 anti-CD63 scFv:GAA (70-952) Fusion Protein CDS - GS-50 |
| 202 | DNA | 12450 anti-CD63 scFv:GAA (70-952) Fusion Protein CDS - RE-8 |
| 203 | DNA | Glycine-Encoding Sequence v1 |
| 204 | DNA | Glycine-Encoding Sequence v2 |
| 205 | DNA | Human GAA (70-952) CDS - 1 - DC |
| 206 | DNA | Human GAA (70-952) CDS - 1 - GS |
| 207 | DNA | Human GAA (70-952) CDS - 2 - DC |
| 208 | DNA | Human GAA (70-952) CDS - 2 - GS |
| 209 | DNA | Human GAA (70-952) CDS - 3 - DC |
| 210 | DNA | Human GAA (70-952) CDS - 3 - GS |
| 211 | DNA | Human GAA (70-952) CDS - 4 - DC |
| 212 | DNA | Human GAA (70-952) CDS - 4 - GS |
| 213 | Protein | GAA 1 77 |
| 214 | Protein | GAA 2 22 |
| 215 | Protein | GAA 3 61 |
| 216-537 | DNA & Protein | Domains in Anti-hTfR Antibodies, Antigen-Binding Fragments or scFv Molecules |
| 538-569 | Protein | Anti-hTfR scFvs |
| 570 | Protein | 12799B-2×G4S-GAA |
| 571 | Protein | 12839B-2×G4S-GAA |
| 572 | Protein | 12843B-2×G4S-GAA |
| 573 | Protein | 12847B-2×G4S-GAA |
| 574 | DNA | 12799B-2×G4S-GAA |
| 575 | DNA | 12839B-2×G4S-GAA |
| 576 | DNA | 12843B-2xG4S-GAA |
| 577 | DNA | 12847B-2×G4S-GAA |
| 578-580 | DNA | Optimized 12799B-2×G4S-GAA |
| 581-583 | DNA | Optimized 12843B-2xG4S-GAA |
| 584-586 | DNA | Optimized 12847B-2xG4S-GAA |
| 587 | DNA | 12799 GA 0 anti-TfR scFv |
| 588 | DNA | 12799 GS 0 anti-TfR scFv |
| 589 | DNA | 12799 GS 0v2 anti-TfR scFv |
| 590 | DNA | 12843 GA 0 anti-TfR scFv |
| 591 | DNA | 12843 GS 0 anti-TfR scFv |
| 592 | DNA | 12843 GS 0v2 anti-TfR scFv |
| 593 | DNA | 12847 GA 0 anti-TfR scFv |
| 594 | DNA | 12847 GS 0 anti-TfR scFv |
| 595 | DNA | 12847 GS 0v2 anti-TfR scFv |
| 596 | DNA | 12799 anti-TfR scFv |
| 597 | DNA | 12839 anti-TfR scFv |
| 598 | DNA | 12843 anti-TfR scFv |
| 599 | DNA | 12847 anti-TfR scFv |
| 600 | Protein | Linker |
| 601 | Protein | Kappa Constant Light Domain |
| 602 | Protein | IgG1 CH1 Heavy Domain |
| 603-672 | Protein | Fab Heavy and Light Chains |
| 673 | Protein | Mus musculus Ror1 Signal Peptide |
| 674 | Protein | IgG4 CH1 Heavy Domain |
| 675-706 | Protein | Additional anti-TfR scFv:GAA Sequences |
| 707 | DNA | 12837scfv-GAA-1 0CpG 27 |
| 708 | DNA | 12837scfv-GAA-2 5CpG 27 |
| 709 | Protein | Optional N-Terminal Sequence |
| 710 | DNA | ITR 141 Reverse Complement |
| 711 | DNA | ITR 130 Reverse Complement |
| 712 | DNA | SV40 polyA V3 |
| 713 | Protein | 3X G4S Linker |
| 714 | Protein | 2X G4S Linker |
| 715-719 | DNA | 3X G4S Linker Coding Sequences |
| 720-726 | DNA | 2X G4S Linker Coding Sequences |
| 727 | DNA | 1X G4S Linker Coding Sequence |
| 728 | DNA | pINT ITR130 12843 GAA native SV40pA |
| 729 | DNA | pINT ITR130 12843scFv:GAA 0CpG v0 (GA 0) |
| 730 | DNA | pINT ITR130 12843scFv:GAA 0CpG v1 (GS 0 v1) |
| 731 | DNA | pINT ITR130 12843scFv:GAA 0CpG v2 (GS 0 v2) |
| 732 | DNA | pINT ITR130 12847scFv:GAA native |
| 733 | DNA | pINT ITR130 12847scFv:GAA 0CpG v0 (GA 0) |
| 734 | DNA | pINT ITR130 12847scFv:GAA 0CpG v1 (GS 0 v1) |
| 735 | DNA | pINT ITR130 12847scFv:GAA 0CpG v2 (GS 0 v2) |
| 736 | DNA | pINT-ITR130-Anti-CD63:GAA GA 0 |

### EXAMPLES

### Example 1. Development of System for Neonatal Insertion Into Albumin Locus in Liver

[0720] A system for nuclease-mediated insertion (e.g., CRISPR/Cas) of a transgene into a specific locus (e.g., albumin intron 1) was developed to produce durable expression of the transgene, including when administered to neonates. Exemplary components of the system, including those used in subsequent examples, are described in more detail below.

### Single Guide RNA Design and Selection

[0721] The ALB locus was selected as the insertion site for the DNA templates. A list of single guide RNAs (sgRNAs) was generated that target human ALB intron 1. See Table 10. Candidate sgRNAs were synthesized and formulated into lipid nanoparticles (LNPs) with Cas9 mRNA for evaluation in vitro and in vivo.

TABLE 10

Human ALB Intron 1 Guide RNAs

| Guide RNA | SEQ ID NO (DNA-Targeting Segment) | SEQ ID NO (Unmodified sgRNA) | SEQ ID NO (Modified sgRNA) | SEQ ID NO (Guide RNA Target Sequence) |
|---|---|---|---|---|
| G009844 | 30 | 62 | 94 | 126 |
| G009851 | 31 | 63 | 95 | 127 |
| G009852 | 32 | 64 | 96 | 128 |
| G009857 | 33 | 65 | 97 | 129 |
| G009858 | 34 | 66 | 98 | 130 |
| G009859 | 35 | 67 | 99 | 131 |
| G009860 | 36 | 68 | 100 | 132 |
| G009861 | 37 | 69 | 101 | 133 |
| G009866 | 38 | 70 | 102 | 134 |
| G009867 | 39 | 71 | 103 | 135 |
| G009868 | 40 | 72 | 104 | 136 |
| G009874 | 41 | 73 | 105 | 137 |
| G012747 | 42 | 74 | 106 | 138 |
| G012748 | 43 | 75 | 107 | 139 |
| G012749 | 44 | 76 | 108 | 140 |
| G012750 | 45 | 77 | 109 | 141 |
| G012751 | 46 | 78 | 110 | 142 |
| G012752 | 47 | 79 | 111 | 143 |
| G012753 | 48 | 80 | 112 | 144 |
| G012754 | 49 | 81 | 113 | 145 |
| G012755 | 50 | 82 | 114 | 146 |
| G012756 | 51 | 83 | 115 | 147 |
| G012757 | 52 | 84 | 116 | 148 |
| G012758 | 53 | 85 | 117 | 149 |
| G012759 | 54 | 86 | 118 | 150 |
| G012760 | 55 | 87 | 119 | 151 |
| G012761 | 56 | 88 | 120 | 152 |
| G012762 | 57 | 89 | 121 | 153 |
| G012763 | 58 | 90 | 122 | 154 |
| G012764 | 59 | 91 | 123 | 155 |
| G012765 | 60 | 92 | 124 | 156 |
| G012766 | 61 | 93 | 125 | 157 |

[0722] LNPs were first screened in primary human hepatocytes (PHH) using a bidirectional nanoluc-encoding AAV insertion template as a reporter. LNPs that supported targeted insertion of nanoluc were identified by measuring nanoluc protein secreted into the supernatant of PHH cultures. Candidates that passed initial PHH screening were then tested for their ability to support in vivo gene insertion. Top candidates from in vivo studies were functionally evaluated for off-target cutting.

[0723] LNP-g9860, which is formulated with ALB-targeting sgRNA 9860, described in more detail below, was selected based on supporting robust transgene expression levels across multiple platforms (primary human and non-human primate hepatocytes, ALB humanized mice, and non-human primates), lack of confirmed off-target sites, translation across species, lack of common human SNPs in the target site, low variability of transgene expression within groups, and performance across a dose range. The target site of sgRNA 9860 is conserved in cynomolgus monkeys. LNP-g9860 had no detectable off-target sites in the human genome (targeted amplicon sequencing performed in two lots of primary human hepatocytes at saturating levels of editing failed to validate any locus other than on-target at ALB) and supported transgene expression via insertion in primary human and non-human primate hepatocytes, ALB humanized mice, and non-human primates.

### LNP-g9860

[0724] LNP-g9860 was developed for use in targeting human ALB intron 1. LNP-g9860 is a lipid nanoparticle that includes a sgRNA of 100 nucleotides in length (g9860) and Cas9-encoding mRNA, each of which is described further below, encapsulated in an LNP comprised of four different lipids. The Cas9 protein, expressed from the Cas9 mRNA, is directed to cleave the DNA when sgRNA 9860 binds to the targeted complementary DNA sequence associated with a PAM. The composition of the LNP is summarized in Table 11. LNP-g9860 comprises four lipids at the following molar ratios: 50 mol% Lipid A, 9 mol% DSPC, 38 mol% cholesterol, and 3 mol% PEG2k-DMG and is formulated in aqueous buffer composed of 50 mM Tris-HCl, 45 mM NaCl, 5% (w/v) sucrose, at pH 7.4. The N:P ratio is about 6, and the gRNA:Cas9 mRNA ratio is about 1:2 by weight.

TABLE 11

Lipid Nanoparticle (LNP-g9860) Composition

| | |
|---|---|
| Component | Description |
| Active Pharmaceutical Components | Cas9 mRNA |
| | sgRNA (gRNA9860) |
| Lipid Excipients | Lipid A: (9Z,12Z)-3-((4,4-bis(octyloxy)butanoyl)oxy)-2-((((3-(diethylamino)propoxy)carbonyl)oxy)methyl)propyl octadeca-9,12-dienoate |
| | Cholesterol |
| | DSPC |
| | PEG2K-DMG |
| Other Excipients | Tris, NaCl, Sucrose |
| | WFI |

[0725] Single guide RNA. The single guide RNA (sgRNA 9860) used in LNP-g9860 is a 100-mer oligonucleotide containing a 20-nucleotide sequence that is complementary to the target region in intron 1 of the human ALB gene. The target sequence recognized by g9860 is conserved in the cynomolgus monkey mfAlb gene intron 1. The sequence for g9860 is set forth in SEQ ID NOs: 68 and 100. Chemical modifications are incorporated into the 100-mer during synthesis, which include phosphorothioate (PS) linkages at the 5′- and 3′-end of the sgRNA and 2′-O-methyl modifications to some of the sugars of the RNA.

[0726] Cas9 mRNA. The Cas9 messenger RNA (mRNA) used in LNP-g9860 is based on the Cas9 protein sequence from Streptococcus pyogenes. The Cas9-encoding mRNA (SEQ ID NO: 1, with a coding sequence (CDS) set forth in SEQ ID NO: 2), is approximately 4400 nucleotides in length. The sequence contains a 5′ cap, a 5′ untranslated region (UTR), an open reading frame (ORF) encoding the Cas9 protein, a 3′ UTR, and a polyA tail. The 5′ cap is generated co-transcriptionally by use of a synthetic cap analogue structure, known as anti-reverse cap analogue (ARCA). The uracils in the mRNA sequence have been completely replaced by a modified N¹ methylpseudouridine during the in vitro transcription. The 5′ end of the mRNA has a synthetic cap analog structure. The poly-A tail is approximately 100 nucleotides.

### LNP-g666

[0727] LNP-g666 was developed for use in targeting mouse Alb intron 1. LNP-g666 is the same as LNP-g9860, except human-albumin-targeting g9860 is replaced with g666, a guide RNA targeting mouse albumin intron 1. The sequence for g666 is set forth in SEQ ID NOS: 166 and 167.

### rAAV8 Vector

[0728] A recombinant AAV8 (rAAV8) vector was developed to carry the DNA insertion templates. The rAAV8 vector carrying the DNA insertion templates is a non-replicating vector that is an AAV-based vector derived from AAV serotype 8. The genome is a single-stranded deoxyribonucleic acid (DNA), comprising inverted terminal repeats (ITR) at each end. The ITRs flank the promoterless insertion template. The AAV ITRs flanking the cassette were derived from AAV2. The DNA insertion templates delivered by rAAV8 vector can be designed as promoterless templates, thus relying on the targeted ALB locus promoter for expression.

### Example 2. Durable Human FIX Protein Expression After Insertion in Neonatal Mice

[0729] To compare episome-mediated expression versus insertion-mediated expression in adult and neonatal mice, and to compare different DNA repair pathways in adult and neonatal mice, we compared hFIX serum levels following administration of a hFIX episome (expression driven by hAAT promoter), a bidirectional hFIX NHEJ insertion template, a hFIX HDR insertion template with homology arms of 500 bp, and a hFIX HDR insertion template with homology arms of 800 bp. See FIG. 1. Neonatal C57BL/6 mice were dosed at P0 or P1 with the following: (1) 4 mg/kg of LNP-g666 and 3e9 vg/mouse of rAAV8 with the hFIX-HDR-500 template; (2) 4 mg/kg of LNP-g666 and 3e9 vg/mouse of rAAV8 with the hFIX-HDR-800 template; (3) 4 mg/kg of LNP-g666 and 3e9 vg/mouse of rAAV8 with the hFIX-NHEJ template; or (4) 3e9 vg/mouse of rAAV8 episomal template. Saline-injected mice were used as a negative control. The hFIX coding sequence in the episomal AAV was a codon-optimized sequence encoding wild type human F9. The hFIX coding sequence in the two HDR constructs was the native human F9 coding sequence with the Padua mutation (R338L). Blood was collected and plasma prepared at 1 week, 2 weeks, and 5 weeks post-dosing. hFIX levels were measured by human FIX ELISA. The experiment was then repeated in adult C57BL/6 mice, with the adult mice being dosed with the following: (1) 0.8 mg/kg of LNP-g666 and 2e10 vg/mouse of rAAV8 with the hFIX-HDR-500 template; (2) 0.8 mg/kg of LNP-g666 and 2e10 vg/mouse of rAAV8 with the hFIX-HDR-800 template; (3) 0.8 mg/kg of LNP-g666 and 2e10 vg/mouse of rAAV8 with the hFIX-NHEJ template; or (4) 2e10 vg/mouse of rAAV8 episomal template. Saline-injected mice were used as a negative control. Blood was collected and plasma prepared at 1 week, 2 weeks, and 4 weeks post-dosing. The results are shown in FIGS. 2A-2B and Tables 12-14. Episome-mediated expression was low even at the first time point compared to insertion-mediated expression in neonates and was lost over time in neonates. The opposite was observed in adult mice: episome-mediated expression was higher at the first time point and subsequent time points compared to insertion-mediated expression in adult mice. These results confirmed what was observed in a previous similar experiment (data not shown). In contrast to the results in the neonatal mice, hFIX levels stayed steady in adult mice with both episomal and insertion constructs, with the episomal construct giving the highest expression. See FIGS. 2A-2B and Tables 12-14.

TABLE 12

Human FIX Serum Levels (µg/mL) in Neonatal Mice
Episome

| | | | | | | | | | |
|---|---|---|---|---|---|---|---|---|---|
| W1 | 0.9 | 0.56 | 0.48 | 0.52 | 0.96 | 0.67 | 0.93 | 0.98 | 0.77 |
| W2 | 0.2 | 0.11 | 0.12 | 0.14 | 0.15 | 0.17 | 0.22 | 0.21 | 0.15 |
| W5 | 0.06 | 0.03 | 0.03 | 0.07 | 0.07 | 0.03 | 0.04 | 0.04 | 0.04 |

NHEJ

| | | | | | |
|---|---|---|---|---|---|
| W1 | 14.22 | 19.28 | 14.12 | 18.67 | 21.69 |
| W2 | 16.08 | 17.25 | 16.07 | 17.66 | 21.39 |
| W5 | 12.29 | 12.41 | 14.18 | 16.61 | 13.71 |

HDR500

| | | | | |
|---|---|---|---|---|
| W1 | 11.03 | 8.02 | 7.86 | 10.11 |
| W2 | 8.29 | 6.74 | 8.63 | 8.61 |
| W5 | 6.27 | 4.09 | 5.24 | 5.49 |

HDR800

| | | | | | | | | | | |
|---|---|---|---|---|---|---|---|---|---|---|
| W1 | 3.86 | 6.44 | 6.52 | 4.43 | | 1.41 | 2 | 3.58 | 2.71 | 2.07 |
| W2 | 3.54 | 6.9 | 7.46 | 4.44 | 4.64 | 1.65 | 2.45 | 3.55 | 2.83 | 2.5 |
| W5 | 2.4 | 3.49 | 3.48 | 3.33 | 3.77 | 0.77 | 2.19 | 2.7 | 2.5 | 1.68 |

TABLE 13

Human FIX Serum Levels (µg/mL) in Adult Mice
Episome

| W1 | 16.69 | 15.57 | 18.97 | 14.17 | 9.82 |
|---|---|---|---|---|---|
| W2 | 25.39 | 23.07 | 41.53 | 27.53 | 12.07 |
| W4 | 39.97 | 26.61 | 39.63 | 28.5 | 14.28 |
| | NHEJ | | | | |
| W1 | 8.1 | 9.52 | 13.09 | 6.55 | 9.2 |
| W2 | 9.15 | 8.12 | 8.18 | 6.46 | 7.27 |
| W4 | 14.86 | 10.86 | 13.85 | 8.42 | 13 |
| | HDR500 | | | | |
| W1 | 2.23 | 2.5 | 1.89 | 3.14 | 1.85 |
| W2 | 1.2 | 2.62 | 1.55 | 2.41 | 1.34 |
| W4 | 3.83 | 5.39 | 4.89 | 4.62 | 2.75 |
| | HDR800 | | | | |
| W1 | 1.65 | 0.94 | 0.26 | 0.54 | 0.14 |
| W2 | 0.69 | 1.52 | 0.24 | 0.67 | 0.46 |
| W4 | 2.13 | 1.87 | 0.49 | 0.94 | 0.43 |

TABLE 14

Human FIX Serum Levels (µg/mL) in Neonatal Mice

| Mice # | Group # | Wk 1 hF9 ug/mL | Wk 2 hF9 ug/mL | Wk 5 hF9 ug/mL | Month 3 hF9 ug/mL | Month 4 hF9 ug/mL | Month 7 hF9 ug/mL | Month 9 hF9 ug/mL | Month 10 hF9 ug/mL | Month 12 hF9 ug/mL | Month 15 hF9 ug/mL |
|---|---|---|---|---|---|---|---|---|---|---|---|
| 1 | Ctrl 1 | ND | ND | ND | ND | ND | ND | ND | ND | ND | ND |
| 2 | Ctrl 2 | ND | ND | ND | ND | ND | ND | ND | ND | ND | ND |
| 3 | Ctrl 3 | ND | ND | ND | ND | ND | ND | ND | ND | ND | ND |
| 4 | Ctrl 4 | ND | ND | ND | ND | ND | ND | ND | ND | ND | ND |
| 5 | Ctrl 5 | ND | ND | ND | ND | ND | ND | ND | ND | ND | ND |
| 6 | Ctrl 6 | ND | ND | ND | ND | ND | ND | ND | ND | ND | ND |
| 7 | Ctrl 7 | ND | ND | ND | ND | ND | ND | ND | ND | ND | ND |
| 8 | Ctrl 8 | ND | ND | ND | ND | ND | ND | ND | ND | ND | ND |
| 9 | HDR500-1 | 11.03 | 8.29 | 6.27 | 3.04 | 3.12 | 3.13 | 3.32 | 3.35 | 2.91 | 1.60 |
| 10 | HDR500-3 | 8.02 | 6.74 | 4.09 | 3.05 | 2.51 | 2.59 | 2.80 | 2.98 | 2.95 | 1.54 |
| 11 | HDR500-4 | 7.86 | 8.63 | 5.24 | 6.61 | 5.11 | 5.44 | 5.62 | 7.64 | 4.76 | 5.97 |
| 12 | HDR500-5 | 10.11 | 8.61 | 5.49 | 5.68 | 6.60 | 5.43 | 5.33 | 7.89 | 5.00 | 7.00 |
| 13 | Episomal 1 | 0.90 | 0.20 | 0.06 | 0.16 | 0.14 | 0.12 | 0.04 | 0.05 | 0.04 | 0.04 |
| 14 | Episomal 2 | 0.56 | 0.11 | 0.03 | 0.09 | 0.09 | 0.08 | 0.03 | 0.03 | 0.04 | 0.06 |
| 15 | Episomal 3 | 0.48 | 0.12 | 0.03 | 0.11 | 0.09 | 0.09 | 0.02 | 0.04 | 0.02 | 0.03 |
| 16 | Episomal 4 | 0.52 | 0.14 | 0.07 | 0.14 | 0.11 | 0.09 | 0.03 | 0.02 | 0.02 | 0.05 |
| 17 | Episomal 5 | 0.96 | 0.15 | 0.07 | NA (mouse died) | | | NA (mouse died) | | | |
| 18 | Episomal 6 | 0.67 | 0.17 | 0.03 | 0.13 | 0.11 | 0.11 | 0.03 | 0.04 | 0.00 | 0.04 |
| 19 | Episomal 7 | 0.93 | 0.22 | 0.04 | 0.13 | 0.09 | 0.09 | 0.09 | 0.05 | 0.04 | 0.03 |
| 20 | Episomal 8 | 0.98 | 0.21 | 0.04 | 0.14 | 0.10 | 0.11 | 0.06 | 0.03 | 0.04 | 0.05 |
| 21 | Episomal 9 | 0.77 | 0.15 | 0.04 | 0.14 | 0.15 | 0.12 | 0.05 | 0.03 | 0.05 | 0.07 |
| 22 | HDR800-1 | 3.86 | 3.54 | 2.40 | 2.08 | 2.26 | 2.91 | 1.66 | 2.09 | 1.98 | 1.77 |
| 23 | HDR800-2 | 6.44 | 6.90 | 3.49 | 3.47 | 3.36 | 3.49 | ND | 2.92 | 2.24 | 2.31 |
| 24 | HDR800-3 | 6.52 | 7.46 | 3.48 | 2.80 | 3.62 | 3.45 | 2.71 | 2.70 | 1.95 | 2.54 |
| 25 | HDR800-4 | 4.43 | 4.44 | 3.33 | 3.59 | 4.55 | 4.14 | 3.22 | 3.75 | 2.51 | 3.28 |
| 26 | HDR800-5 | NA | 4.64 | 3.77 | 3.47 | 3.82 | 4.26 | 4.57 | 4.56 | 3.65 | 3.95 |
| 27 | HDR800-6 | 1.41 | 1.65 | 0.77 | 1.54 | 1.48 | 1.19 | 3.35 | 1.50 | 1.47 | 1.60 |
| 28 | HDR800-7 | 2.00 | 2.45 | 2.19 | 3.32 | 3.11 | 2.26 | 2.37 | 2.75 | 2.63 | 2.29 |
| 29 | HDR800-8 | 3.58 | 3.55 | 2.70 | 2.16 | 2.09 | 2.36 | 1.58 | 2.04 | 1.59 | 2.08 |
| 30 | HDR800-9 | 0.09 | 0.10 | 0.03 | NA (mouse died) | | | NA (mouse died) | | | |
| 31 | HDR800-10 | 2.71 | 2.83 | 2.50 | 3.87 | 3.36 | 3.12 | 2.52 | 3.58 | 2.45 | 2.80 |
| 32 | HDR800-11 | 2.07 | 2.50 | 1.68 | 1.35 | 1.66 | 1.28 | 1.15 | 1.45 | 1.01 | 1.50 |
| 33 | NHEJ 1 | 6.45 | 5.75 | NA (mouse died) | | | | NA (mouse died) | | | |
| 34 | NHEJ 2 | 14.22 | 16.08 | 12.29 | 10.58 | 8.44 | 9.27 | 9.45 | 11.67 | 7.24 | 8.95 |
| 35 | NHEJ 3 | 19.28 | 17.25 | 12.41 | 15.67 | 18.44 | 15.77 | 14.70 | 18.38 | 14.58 | 14.80 |
| 36 | NHEJ 4 | 15.19 | NA (mouse died) | | | | | NA (Mouse died) | | | |
| 37 | NHEJ 5 | 14.12 | 16.07 | 14.18 | 17.28 | 15.39 | 14.79 | 16.99 | 18.47 | 14.32 | 14.68 |
| 38 | NHEJ 6 | 18.67 | 17.66 | 16.61 | 19.46 | 21.53 | 22.32 | 18.93 | 23.21 | 19.53 | 21.90 |
| 39 | NHEJ 7 | 18.23 | NA (mouse died) | | | | | NA (Mouse died) | | | |
| 40 | NHEJ 8 | 21.69 | 21.39 | 13.71 | 11.15 | 11.88 | 12.72 | 12.36 | 18.53 | 11.19 | 18.07 |

[0730] These experiments showed that expression of inserted F9 is durable in neonatal livers, indicating that insertion of F9 templates into the albumin locus can result in durable expression in neonatal subjects. These genome integration provided durable expression that was maintained throughout the experiment in neonatal mice.

### Example 3. Development of Neonatal Insertion System and Reagents for Treatment of Pompe Disease

[0731] A system for nuclease-mediated insertion (e.g., CRISPR/Cas) of an anti-CD63:GAA transgene or an anti-TfR:GAA transgene into a specific locus (e.g., albumin intron 1) was developed to produce durable expression of anti-CD63:GAA or anti-TfR:GAA, including when administered to neonates.

[0732] Exemplary components of the system for insertion for anti-CD63:GAA, including those used in subsequent examples, are described in more detail below. See FIGS. 3-5. The anti-CD63:GAA DNA template in the working examples described below is brought into the liver by a recombinant AAV8 vector, and the CRISPR/Cas9 RNA components (Cas9 mRNA and sgRNA) are delivered to the liver by LNP-mediated delivery (FIGS. 3 and 5). The anti-CD63:GAA protein produced by the liver is targeted to lysosomes in the muscle by targeting CD63, which is a rapidly internalizing protein highly expressed in the muscle. See FIG. 4. Single guide RNA, LNP-g9860, Cas9 mRNA, and LNP-g666 design and selection were as described in Example 1.

[0733] Exemplary components of the system for anti-TfR:GAA, including those used in subsequent examples, are described in more detail below. See FIGS. 15-17. The anti-TfR:GAA DNA templates in the working examples described below are brought into the liver by a recombinant AAV8 vector, and the CRISPR/Cas9 RNA components (Cas9 mRNA and sgRNA) are delivered to the liver by LNP-mediated delivery (FIGS. 15 and 17). The anti-TfR:GAA protein produced by the liver is targeted the muscle and CNS by targeting TfR, which is expressed in muscle and on brain endothelial cells. Transcytosis of TfR in these cells enables blood-brain-barrier crossing. See FIG. 16. Single guide RNA, LNP-g9860, Cas9 mRNA, and LNP-g666 design and selection were as described in Example 1.

### DNA Template Design and Selection

[0734] We engineered a DNA template for insertion of a nucleic encoding anti-CD63:GAA fusions in which the C-terminus of a single-chain fragment variable (scFv) is fused to the N-terminus of amino acids 70-952 of GAA with a glycine-serine linker. The GAA (70-952) sequence is set forth in SEQ ID NO: 173 and is encoded by the sequence set forth in SEQ ID NO: 174. The DNA template is set forth in SEQ ID NO: 194 and encodes the fusion protein set forth in SEQ ID NO: 193. A splice acceptor site is encoded upstream of the anti-CD63:GAA transgene, and a polyadenylation sequence is encoded downstream of the anti-CD63:GAA transgene. The splice acceptor sequence at the 5′ end of the transgene was derived from mouse Alb exon 2 splice acceptor. The polyadenylation sequence at the 3′ end of the transgene was derived from simian virus 40 (SV40).

[0735] We engineered DNA templates for insertion of a nucleic encoding anti-TfR:GAA fusions in which the C-terminus of a single-chain fragment variable (scFv) is fused to the N-terminus of amino acids 70-952 of GAA with a glycine-serine linker. The GAA (70-952) sequence is set forth in SEQ ID NO: 173 and is encoded by the sequence set forth in SEQ ID NO: 174. A splice acceptor site is encoded upstream of the anti-TfR:GAA transgene, and a polyadenylation sequence is encoded downstream of the anti-TfR:GAA transgene. The splice acceptor sequence at the 5′ end of the transgene was derived from mouse Alb exon 2 splice acceptor. The polyadenylation sequence at the 3′ end of the transgene was derived from simian virus 40 (SV40).

### rAAV8 Vector

[0736] A recombinant AAV8 (rAAV8) vector was developed to carry the DNA insertion templates. The rAAV8 vector carrying the anti-CD63:GAA DNA template (REGV044) is a non-replicating vector that is an AAV-based vector derived from AAV serotype 8. The genome is a single-stranded deoxyribonucleic acid (DNA), comprising inverted terminal repeats (ITR) at each end. The ITRs flank the anti-CD63:GAA promoterless insertion template. The AAV ITRs flanking the cassette were derived from AAV2. The anti-CD63:GAA DNA template delivered by rAAV8 vector was designed as a promoterless template, thus relying on the targeted ALB locus promoter for expression.

[0737] The rAAV8 vector carrying the anti-TfR:GAA DNA template is a non-replicating vector that is an AAV-based vector derived from AAV serotype 8. The genome is a single-stranded deoxyribonucleic acid (DNA), comprising inverted terminal repeats (ITR) at each end. The ITRs flank the anti-TfR:GAA promoterless insertion template. The AAV ITRs flanking the cassette were derived from AAV2. The anti-TfR:GAA DNA template delivered by rAAV8 vector was designed as a promoterless template, thus relying on the targeted ALB locus promoter for expression.

### Example 4. Durable Alpha-Glucosidase (GAA) Expression After Insertion of Anti-CD63:GAA DNA Template in Neonatal Mice

[0738] We next engineered a DNA template for insertion of a nucleic encoding anti-CD63:GAA fusions in which the C-terminus of an anti-CD63 single-chain fragment variable (scFv) is fused to the N-terminus of GAA with a glycine-serine linker (described above). We tested the anti-CD63:GAA insertion template in a Pompe disease (PD) mouse model, Gaa^{-/-} ;Cd63^{hu/hu}, where Gaa was replaced by LacZ and the protein-coding region of the Cd63 locus was replaced with its human counterpart. Adult (2-month old) male and female Gaa^{-/-};Cd63^{hu/hu} mice (62.5% C57BL/6, 37.5% 129 Sv) were dosed intravenously with the following: (1) 4e12 vg/kg recombinant AAV8 encoding anti-CD63:GAA (REGV042); or (2) 1 mg/kg LNP-g666 and 1.2e13 vg/kg recombinant AAV8 anti-CD63:GAA insertion template (REGV044). REGV042 is an episomal AAV that uses a hSerpinal enhancer and a mTTR promoter to give hepatocyte-specific expression of anti-CD63:GAA, which further includes a human albumin signal peptide. The anti-CD63:GAA coding sequences were identical in REGV042 and REGV044 and are set forth in SEQ ID NO: 194. Untreated Gaa^{-/-};Cd63^{hu/hu} mice and wild type mice were used as controls. Blood was collected and serum prepared at 7 days, 30 days, 2 months, 3 months, 6 months, and 10 months post-administration, and tissues were collected at 10 months post-administration. Anti-CD63:GAA serum levels were quantified using a plate-based sandwich ELISA that detects the scFv portion of the molecule. Anti-CD63:GAA purified protein was used as a protein standard for quantification. Data are shown in FIG. 6 and Tables 15-16. At 10 months post-administration, animals were sacrificed, and glycogen levels were quantified in muscle tissue lysates of the sacrificed animals. Tissues were dissected from mice immediately after sacrifice by CO₂ asphyxiation, snap frozen in liquid nitrogen, and stored at -80° C. Tissues were lysed on a benchtop homogenizer with stainless steel beads in distilled water for glycogen measurements or RIPA buffer for protein analyses. Glycogen analysis lysates were boiled and centrifuged to clear debris. Glycogen measurements were performed fluorometrically with a commercial kit according to manufacturer’s instructions (K646, BioVision, Milpitas, CA, USA). As shown in FIG. 7 and Tables 17-19, glycogen was significantly reduced to near wild type levels in both the episomal group and the insertion group in heart, quadricep, and diaphragm in adult mice.

TABLE 15

Serum Levels of Anti-CD63:GAA in µg/mL in Insertion Adult Group

| Months | M1 | M2 | M3 | M4 | M5 | F1 | F2 | F3 | F4 | F5 | F6 | F7 |
|---|---|---|---|---|---|---|---|---|---|---|---|---|
| 0.25 | 21.06 | 2.6 | 14.93 | 24.37 | 24.39 | 16.08 | 11.21 | 18.35 | 28.54 | 20.94 | | |
| 1 | 16.43 | 1.85 | 17.92 | 13.45 | 3.7 | 18.88 | 19.37 | 26.6 | 19.8 | 28.72 | 26.63 | 19.97 |
| 2 | 13.15 | 2.95 | 13.82 | 6.06 | 11.51 | 6.45 | 9.5 | 8.05 | 11.61 | 19.2 | 12.07 | 14.09 |
| 3 | 14.49 | 2.53 | 7.22 | 6.04 | 5.75 | 4.62 | 10.19 | 5.75 | 14.8 | 12.93 | 6.61 | 10.26 |
| 6 | 12.92 | 3.13 | 12.08 | 8.18 | 5.54 | 2.48 | 9.08 | 8 | 18.66 | 2.78 | 5.03 | 15.15 |
| 10 | 16.5 | 2 | 7.5 | 10.6 | 2.3 | | 2.4 | | | | | |

^{∗}Cells without data were due to lost samples post-collection.

TABLE 16

Serum Levels of Anti-CD63:GAA in µg/mL in Episomal Adult Group

| Months | M1 | M2 | M3 | M4 | M5 | M6 | M7 | F1 | F2 | F3 | F4 | F5 |
|---|---|---|---|---|---|---|---|---|---|---|---|---|
| 0.25 | 62.13 | 52.18 | 47.7 | 53.55 | 4.9 | 4.85 | 2.92 | 11.55 | 0 | 0 | 8.37 | 0.6 |
| 1 | 43.85 | 48.12 | 40.68 | 49.22 | 14.41 | 15.74 | 2.21 | 19.18 | 0 | 1.09 | 4.57 | 2.25 |
| 2 | 43.68 | 30.59 | 29.79 | 35.37 | 7.88 | 6.71 | 1.67 | 11.27 | 0 | 0.51 | 0.54 | 0 |
| 3 | 51.86 | 47.18 | 38.41 | 50.98 | 5.05 | 10.89 | 1.54 | 3.26 | 0 | 0 | 0.19 | 0.6 |
| 6 | 42.49 | 40.95 | 44.62 | 44.2 | 4.42 | 4.03 | 1.93 | 0.35 | 0 | 0 | 0.17 | 0.17 |
| 10 | 20.9 | 17.9 | 18 | 13.1 | 5.2 | 4.9 | 1.2 | 0.1 | 0 | 0 | 0 | 0 |

TABLE 17

Glycogen Levels in Insertion Adult Group

| | M1 | M2 | M3 | M4 | M5 | F1 | F2 | F3 | F4 | F5 | F6 | F7 |
|---|---|---|---|---|---|---|---|---|---|---|---|---|
| Heart | 0.02 | 0.02 | 0.02 | 0.01 | 0.22 | 0.02 | 0.02 | 0.19 | 0.04 | 0.02 | 0.04 | 0.02 |
| Quadricep | 0.43 | 3.24 | 0.47 | 0.79 | 2.12 | 0.5 | 2.32 | 0.82 | 1.06 | 3.45 | 0.83 | 0.89 |
| Diaphragm | 2.85 | 1.51 | 0.34 | 2.24 | 4.75 | 0.37 | 4.06 | 0.9 | 4.47 | 4.56 | 2.86 | 0.04 |
| Spinal Cord | 4.28 | 8.11 | 5.82 | 1.38 | 3.41 | 5.46 | 6.68 | 5.63 | 4 | 4.62 | 5.57 | 7.02 |

TABLE 18

Glycogen Levels in Episomal Adult Group

| | M1 | M2 | M3 | M4 | M5 | M6 | M7 | F1 | F2 | F3 | F4 | F5 |
|---|---|---|---|---|---|---|---|---|---|---|---|---|
| Heart | 0.18 | 0.13 | 0.22 | 0.02 | 0.18 | 0.02 | 0 | 1.04 | 15.39 | 4.99 | 5.74 | 0.13 |
| Quadricep | 0.87 | 0.54 | 0.72 | 0.27 | 0.71 | 0.85 | 2.78 | 6.09 | 12.05 | 10.46 | 11.31 | 2.89 |
| Diaphragm | 2.39 | 1.62 | 3.41 | 1.22 | 2.13 | 0.32 | 0.75 | 6.41 | 9.94 | 9.7 | 8.58 | 2.89 |
| Spinal Cord | 0.3 | 2.63 | 3.37 | 3.19 | 2.96 | 5.99 | 6.1 | 4.66 | 6.46 | 7.9 | 8.15 | 7.67 |

TABLE 19

Glycogen Levels in Control Adult Groups

| | Untreated Pompe mice (GAA-/- ; CD63 hu/hu) | | | | Wild-type (GAA+/+ CD63hu/hu) | | | |
|---|---|---|---|---|---|---|---|---|
| | M1 | M2 | F1 | F2 | M1 | M2 | F1 | F2 |
| Heart | 51.59 | 44.11 | 46.31 | 38.79 | 0.12 | 0.85 | 1.57 | 0.02 |
| Quadricep | 21.63 | | | | 0 | 0.74 | 0 | 0 |
| Diaphragm | 20.55 | 19.89 | 19.29 | 22.63 | 0 | 0.7 | 0.42 | 0.02 |
| Spinal Cord | 9.05 | 3.5 | 7.17 | 7.78 | 0 | 0.77 | 0.96 | 0.05 |

^{∗}Cells without data were due to experimental error.

[0739] Similar experiments were then performed in which neonatal Gaa^{-/-};Cd63^{hu/hu} mice (62.5% C57BL/6, 37.5% 129 Sv) were dosed intravenously at P1 with the following: (1) 8.2e12 vg/kg recombinant AAV8 encoding anti-CD63:GAA (REGV042); or (2) 4 mg/kg LNP-g666, and 8.2e12 vg/kg recombinant AAV8 anti-CD63:GAA insertion template (REGV044). Untreated Gaa^{-/-};Cd63^{hu/hu} mice and wild type mice were used as controls. Blood was collected and serum prepared at 7 days, 30 days, 2 months, 3 months, 4 months, 5 months, 6 months, 7 months, 8 months, 9 months, 12 months, 13 months, and 15 months, and tissues were collected at 3 months and 15 months post-administration. As shown in FIGS. 8A-8B and Tables 20-21, in contrast to what was observed when adult mice were dosed, the serum anti-CD63:GAA levels were stable over the 15-month time course in the insertion group, but the episomal group started out lower and dropped off to below the lower limit of quantification using the serum ELISA assay within 1 month when neonatal mice were dosed. Similarly, as shown in FIG. 9A and Table 22, glycogen storage at 3 months was normalized to wild type levels in heart, quadricep, gastrocnemius, and diaphragm in the insertion group, but not in the episomal group. Likewise, as shown in FIG. 9B and Table 23, glycogen storage at 15 months was normalized to wild type levels in heart, quadricep, gastrocnemius, and diaphragm in the insertion group, and glycogen storage was partially corrected in CNS tissues in the insertion group but not the episomal group.

TABLE 20

Serum Anti-CD63:GAA Levels (µg/mL) in Neonatal Mice with Insertion Group

| Months | Insertion (AAV+LNP) | | | | | | | | | | | | | | | | | | |
|---|---|---|---|---|---|---|---|---|---|---|---|---|---|---|---|---|---|---|---|
| | ^{∗} | ^{∗} | ^{∗∗} | ^{∗∗} | ^{∗∗} | | | | | | | | ^{∗∗} | | | | ^{∗} | ^{∗} | ^{∗} |
| 0.23 | 18.3 | 14.4 | 15.9 | 12.2 | 12.8 | 8.7 | 5.9 | 15.1 | 9.5 | 14.6 | 8.2 | 11.6 | 5.7 | 8.4 | 14 | 13.7 | 8.8 | 8.6 | 3.4 |
| 1 | 13.2 | 14.8 | 13.9 | 9 | 10.3 | 5.4 | 3.9 | 11.1 | 6.1 | 11.2 | 8 | 9.9 | 4.7 | 9.4 | 11.5 | 8.7 | 10.2 | 11.1 | 0 |
| 3 | 10.2 | 10.9 | | | | 3.5 | 2.3 | 10.3 | 5.8 | 7.2 | 6.9 | 8.2 | 2.7 | 7.9 | 14.7 | 5.5 | 7.2 | 6.2 | 2.8 |
| 4 | | | | | | 5.2 | 2.8 | 8.7 | 7.2 | 8.7 | 6.8 | 8.4 | | 7.4 | 14.5 | 6.8 | | | |
| 5 | | | | | | 7.1 | 4.1 | 12.1 | 6.6 | 10.2 | 8.1 | 9 | | 8.5 | 16.6 | 8.8 | | | |
| 6 | | | | | | 6.9 | 4.2 | 14.8 | 7 | 10.2 | 7 | 7.9 | | 9.2 | 13.1 | 8 | | | |
| 7 | | | | | | 8.9 | 4.9 | 17.5 | 11.2 | 10.4 | 9.9 | 10 | | 9.1 | 13.4 | 9.6 | | | |
| 8 | | | | | | 8.5 | 4.4 | 17 | 6 | 8.9 | 8.4 | 8.5 | | 8.1 | 12.5 | 9.3 | | | |
| 9 | | | | | | 5.9 | 3.1 | 10.7 | 5.2 | 25.4 | 7.5 | 5.9 | | 6.5 | 9.4 | 6.2 | | | |
| 12 | | | | | | 6.7 | 3.6 | 10.3 | 6.8 | 17.8 | 6.8 | 7.3 | | 6.7 | 9.7 | 5.9 | | | |
| 13 | | | | | | 4.6 | 3.7 | 17.4 | 4.2 | 17.0 | N/A | 6.1 | | 5.3 | 10.3 | 5.6 | | | |
| 15 | | | | | | 5.1 | 3.8 | 18.4 | 4.0 | 18.3 | 7.6 | 3.9 | | 5.5 | 18.0 | 6.6 | | | |

^{∗}Mouse sacrificed at 3 months for 3-month glycogen assay
^{∗∗}Mouse died

TABLE 21

Serum Anti-CD63:GAA Levels (µg/mL) in Neonatal Mice with Episomal Group

| Months | Episomal AAV | | | | | | | | | | |
|---|---|---|---|---|---|---|---|---|---|---|---|
| | ^{∗} | ^{∗} | ^{∗} | ^{∗∗} | | | ^{∗∗} | | | | |
| 0.23 | 0 | 0 | 1.9 | 0 | 2.2 | 4.1 | 2.5 | 2.7 | 3.7 | 3.4 | 3.6 |
| 1 | 0 | 0 | 0 | 0 | 0 | 0 | 0 | 0 | 0 | 0 | 0 |
| 3 | 0 | 0 | 0 | 0 | 0 | 0 | 0 | 0.3 | 0.4 | 0.5 | 0 |
| 4 | | | | 0 | 0 | 0 | 0 | 0 | 0 | 0 | 0 |
| 5 | | | | | 0 | 0 | 0 | 0 | 0 | 0.6 | 0 |
| 6 | | | | | 0 | 0 | 0 | 0 | 0.5 | 0.6 | 0 |
| 7 | | | | | 0 | 0 | 0 | 0 | 0 | 0 | 0 |
| 8 | | | | | 0 | 0.5 | 0 | 0 | 0.5 | 1 | 0 |
| 9 | | | | | 0 | 0 | 0 | 0 | 0 | 0 | 0 |
| 12 | | | | | 0 | 0 | 0 | 0 | 0 | 0 | 0 |
| 13 | | | | | 0 | 0 | 0 | 0 | 0 | 0 | 0 |
| 15 | | | | | 0 | 0 | | 0 | 0 | 0 | 0 |

^{∗}Mouse sacrificed

TABLE 22

Glycogen Levels (µg/mg Tissue) in Neonatal Mice

| | Untreated KO | | | | Episomal AAV | | | Gene Insertion | | | | |
|---|---|---|---|---|---|---|---|---|---|---|---|---|
| Heart | 20.16 | 18.52 | 20.14 | 21.92 | 0.16 | 0.1 | 0.1 | 0.08 | 0.06 | 0.08 | 0.04 | 0.02 |
| Quadricep | 8.96 | 10.83 | 9.89 | 9.63 | 4.18 | 2.13 | 4.21 | 0.89 | 0.77 | 0.82 | 0.1 | 0.58 |
| Gastrocnemius | 10.39 | 10.65 | 9.31 | 9.77 | 5.58 | 3.66 | 3.75 | 1.04 | 0.83 | 1.12 | 0.38 | 0.73 |
| Diaphragm | 10.05 | 7.73 | 11.33 | 9.6 | 0.5 | 0.59 | 1.7 | 0.57 | 0.7 | 0.85 | 0.34 | 0.9 |

TABLE 23

Glycogen Levels (µg/mg Tissue) in Neonatal Mice
WT

| | | | | | | |
|---|---|---|---|---|---|---|
| Heart | 0.18 | 0.03 | 0.09 | 0.12 | 0.04 | 0.04 |
| Quadricep | 0.95 | 0.77 | 0.86 | 1.01 | 1.35 | 0.85 |
| Gastrocnemius | 0.8 | 0.68 | 0.61 | 1.02 | 1.06 | 0.53 |
| Diaphragm | 0.6 | 0.12 | 2.24 | 1.25 | 0.22 | 0.03 |
| Cerebrum | 0.02664 | 0 | 0 | 0.04436 | 0 | 0.00255 |
| Spinal Cord | 0.01999 | 0 | 0 | 0 | 0.026 | 0 |

Untreated

| Heart | 40.73 | 42.15 | 45.87 | 46.84 | 39.15 | | | | | |
|---|---|---|---|---|---|---|---|---|---|---|
| Quadricep | 12.42 | 11.02 | 14.71 | 15.05 | 13.43 | | | | | |
| Gastrocnemius | ^{∗} | 10.99 | 11.6 | 14.56 | 12.86 | | | | | |
| Diaphragm | 16.49 | 10.57 | 18.33 | 17.3 | 11.87 | | | | | |
| Cerebrum | 7.28 | 6.26 | 7.02 | 6.98 | 8.23 | | | | | |
| Spinal Cord | 8.46 | 10.34 | 9.37 | 9.94 | 9.49 | | | | | |
| | P1 episomal | | | | | | | | | |
| Heart | 0.42 | 0.17 | 0.69 | 0.21 | 0.09 | 0.09 | | | | |
| Quadricep | 11.27 | 8.47 | 1.85 | 2.72 | 1.43 | 0.96 | | | | |
| Gastrocnemius | 7.73 | 5.36 | 2.02 | 2.18 | 2.03 | 1.84 | | | | |
| Diaphragm | 3.09 | 0.8 | 0.74 | 0.76 | 0.33 | 0.42 | | | | |
| Cerebrum | 8.26 | 5.63 | 7.25 | 7.48 | 5.87 | 6.33 | | | | |
| Spinal Cord | 6.42 | 4.93 | 7.46 | 7.13 | 7.61 | 7.55 | | | | |
| | P1 insertion | | | | | | | | | |
| Heart | 0.04 | 0.12 | 0.13 | 0.06 | 0.25 | 2.1 | 0 | 0.05 | 0.04 | 0.07 |
| Quadricep | 0.6 | 0.64 | 0.68 | 0.54 | 0.58 | 0.61 | 0.27 | 0.85 | 0.35 | 0.5 |
| Gastrocnemius | 0.43 | 0.65 | 0.51 | 0.51 | 0.46 | 0.9 | 0.27 | 1.06 | 0.24 | 0.43 |
| Diaphragm | 0.16 | 0.29 | 0.08 | 0.12 | 0.39 | 0.77 | 0 | 0 | 0.59 | 0.12 |
| Cerebrum | 3.09 | 4.59 | 1.18 | 3.06 | 1.87 | 2.42 | 3.33 | 2.2 | 2.39 | 3.29 |
| Spinal Cord | 3.61 | 4.89 | 1.88 | 3.55 | 1.03 | 3.79 | 3.39 | 3.72 | 2.23 | 3.42 |

[0740] To assess whether the improved glycogen reduction observed with the insertion template in neonatal mice translated into improved muscle function, the mice were tested on grip strength apparatuses at 15 months post-administration. Limb grip strength was measured with a force meter (Columbus Instruments, Columbus, OH, USA). All tests were performed in triplicate. Mice treated with the insertion template showed significantly improved performance compared to mice treated with the episomal construct on the grip strength test. In fact, the grip strength in the insertion group tracked closely with that of wild type mice at 15 months posttreatment, whereas there was no difference in the grip strength in the episomal group tracked compared to the untreated group. See FIG. 10 and Table 24. These results show that, in neonatal mice, the insertion approach shows vastly improved durability of expression compared to the episomal approach, and better substrate reduction, indicating that insertion is the superior approach for pediatric indications.

TABLE 24

Grip Strength (Newtons) in Neonatal Mice

| Wild-type | Untreated KO | P1 insertion AAV+LNP | P1 episomal AAV |
|---|---|---|---|
| 2.21 | 1.39 | 2.44 | 1.83 |
| 2.21 | 1.63 | 2.34 | 1.47 |
| 2.52 | 1.48 | 2.51 | 0.94 |
| 2.55 | 1.66 | 2.68 | 1.81 |
| 2.81 | 1.37 | 3.13 | 2.2 |
| 2.69 | 2.27 | 0.95 | 2.61 |
| 3.29 | 1.5 | 2.99 | |
| 2.79 | | 2.42 | |
| | | 2.66 | |
| | | 3.13 | |

[0741] An experiment was performed in which 4-month old Gaa^{-/-};Alb^{hu/hu} mice (n=3) were dosed intravenously with 7.5e10 vg/mouse recombinant AAV8 anti-CD63:GAA insertion template (REGV044) and 1 mg/kg LNP-g9860 in order to validate that anti-CD63:GAA can be inserted into mice humanized for albumin using human albumin gRNA. Blood was collected and serum prepared at 7 days, 14 days, 35 days, and 60 days post-administration. GAA serum levels up to ~3 µg/mL were observed and were maintained over the time course (data not shown), confirming that anti-CD63:GAA can be inserted into mice humanized for albumin using human albumin gRNA.

[0742] In summary, the combination of the highly precise and targeted CRISPR/Cas9 technology delivered by LNP and the anti-CD63:GAA DNA template delivered by the selected rAAV8 vector allows for long-term expression of anti-CD63:GAA protein from hepatocytes and delivery to muscle cells affected in PD, potentially providing a life-long effective treatment to PD patients, including neonatal patients.

[0743] These results show that, in neonatal mice, the insertion approach shows vastly improved durability of expression compared to the episomal approach, indicating that insertion is the superior approach in neonatal subjects.

### Example 5. Optimized Anti-CD63:GAA DNA Templates

[0744] Optimized anti-CD63:GAA templates were generated to develop a lead for non-human primate (NHP) studies. To select a development candidate, several versions of the insertion cassette were generated in which the nucleotide sequence encoding the anti-CD63:GAA was modified (e.g., by depleting CpGs). Table 25 lists the different versions of anti-CD63:GAA inserts designed. In addition, the GS 50 construct was further optimized to remove the six activating CpG motifs but leaving the 44 non-activating CpG motifs (GS 44; SEQ ID NO: 200). The GS 0 construct was further optimized (GS 0v2; SEQ ID NO: 198) by removing an AATAA polyA, removing a cryptic splice acceptor, and replacing a glycine encoding GGGGGGGGGGG (SEQ ID NO: 203) with GGAGGAGGTGG (SEQ ID NO: 204).

TABLE 25

Anti-CD63:GAA Inserts for Insertion Cassettes

| Anti-CD63:GAA Insert | Transgene CpG Content | SEQ ID NO |
|---|---|---|
| First generation | 181 | 194 |
| GS 0 | 0 | 197 |
| GS 0v2 | 0 | 198 |
| DC 0 | 0 | 195 |
| GS 1 | 1 | 199 |
| RE 8 | 8 | 202 |
| GS 50 | 50 | 201 |
| GS 44 | 44 | 200 |
| GA 0 | 0 | 196 |

[0745] Peripheral blood mononuclear cells (PBMCs) were isolated from human blood. Plasmacytoid dendritic cells (pDCs) were enriched and combined with pBMCs (1e4 pDCs + 1e5 PBMCs per well). The cells were incubated for 16-18 hours with AAV6 or control CpG-oligodeoxynucleotides (ODNs). The supernatants were harvested, and an IFNα ELISA was performed. This assay assessed whether CpG-depleted anti-CD63:GAA sequences exhibited reduced IFN-I responses in a primary human plasmacytoid DC-based assay as compared to non-CpG-depleted sequences. The tested samples, including a positive control AAV6-GFP and a negative control CpG-depleted (0 CpG F9 transgene) template, are shown in Table 26. The results are shown in FIG. 11.

TABLE 26

AAV6 Anti-CD63:GAA Templates Tested for IFNα response in pDC/AAV assay.

| Genome | Transgene CpG content | TOTAL CpG content w/ ITRs |
|---|---|---|
| AAV6 GFP (SFFV eGFP WPRE) | 99 | 175 |
| First generation | 181 | 213 |
| GS 50 | 50 | 82 |
| GS 44 | 44 | 75 |
| GA 0 | 0 | 32 |
| GS 0 v2 | 0 | 32 |
| F9 0 CpG template | 0 | 33 |

[0746] Activity of the optimized templates was tested in a primary human hepatocyte assay. AAV templates were packaged into AAV2 viruses. Primary human hepatocytes were grown in 96-well plates and administered the AAV (AAV2, AAV6, or AAV8) containing the template DNA and LNP-g9860 at either fixed MOI with LNP dose titration or fixed LNP concentration with AAV dose titration. Supernatants were collected 7 days post-dosing and stored at -80° C. Supernatants were thawed and GAA activity in the supernatants was measured using a 4-methylumbelliferone-based fluorometric assay (K690, BioVision, Milpitas, CA, USA) as a measurement of amount of enzymatically active GAA produced and secreted from the cells. A first batch of optimized anti-CD63:GAA and anti-TfR:GAA templates were tested using AAV2 as shown in Table 27 and FIG. 12. The 50 CpG anti-CD63:GAA template expressed similarly to the native template, but the initial templates with fewer CpGs did not express well. Additional optimized anti-CD63:GAA templates were tested using AAV6 as shown in Table 28 and FIG. 13. The GA 0 CpG anti-CD63:GAA template maintained expression compared to the native high CpG template in the in vitro primary human hepatocyte insertion assay. Similar results were observed using AAV8 instead of AAV6 (data not shown). The GA 0 CpG anti-CD63:GAA template produced functional GAA in the primary human hepatocyte assay at levels similar to the native while also producing reduced IFNα responses in the pDC/AAV assay.

TABLE 27

AAV2 Anti-CD63:GAA and Anti-TfR:GAA Templates Tested for GAA Activity in PHH Supernatant

| Genome | Transgene CpG content |
|---|---|
| First generation | 181 |
| GS 50 | 50 |
| RE 8 | 8 |
| GS 0 | 0 |
| 12837scfv-GAA-1 0CpG 27 | 0 |
| 12837scfv-GAA-2 5CpG 27 | 5 |

TABLE 28

AAV6 Anti-CD63:GAA Templates Tested for GAA Activity in PHH Supernatant

| Genome | Transgene CpG content |
|---|---|
| First generation | 181 |
| GS 50 | 50 |
| GS 44 | 8 |
| GA 0 | 0 |
| GS 0v2 | 0 |

[0747] Expression of the optimized templates was validated following insertion in Gaa^{-/-} mice as described in Example 4. Adult mice were dosed intravenously at with 1.97e12 vg/kg recombinant AAV8 anti-CD63:GAA insertion template (REGV044) and 1 mg/kg LNP-g666. The recombinant AAV8 templates tested included the native 181 CpG anti-CD63:GAA insertion template (REGV044), the GA 0 CpG template, the GSa50 CpG template, and the GS 44 CpG template. Untreated Gaa^{-/-} mice and wild type mice were used as controls. Blood was collected and serum prepared at 13 days, 34 days, and 92 days post-administration. As shown in FIG. 14A, the GA 0 CpG template showed similar serum expression in vivo in adult Gaa^{-/-} mice compared to the native high CpG template. As shown in FIG. 14B, the serum expression levels were consistent over three time points.

[0748] Expression of the GA 0 CpG anti-CD63:GAA template (SEQ ID NOS: 196 and 736) was evaluated following insertion in non-human primates. Two-year old cynomolgus macaques were administered recombinant AAV8 containing the CpG depleted anti-CD63:GAA template and an LNP-g9860 targeting the cynomolgus albumin intron 1. Three different recombinant AAV8 doses were used (0.3e13vg/kg, 1.5e13vg/kg, and 5.6e13vg/kg) with a 3 mg/kg LNP dose. N=1 in the vehicle control group, and N=3 in the dosed groups. Serum GAA activity was measured using a fluorometric substrate assay in the monkeys through the course of the study. An AAV-dose-dependent increase in serum GAA activity levels was observed over time in the groups (FIG. 27A). This indicated successful insertion of the anti-CD63:GAA transgene into the albumin locus and resultant expression and secretion of the transgene in the animals. Tissues were collected at sacrifice (Day 89) and probed by western blot for presence of a 76 kDa lysosomal form of GAA. A dose-dependent increase of lysosomal GAA in the tissues was observed in the heart and diaphragm (FIG. 27B), which indicated delivery of the liver-derived anti-CD63:GAA protein to the distal tissues.

[0749] Activity of the optimized templates is validated in the PD mouse model, Gaa^{-/-} ;Cd63^{hu/hu}, as described in Example 4.

[0750] Expression of the optimized templates is evaluated in non-human primates. Two LNP doses and two gRNAs are tested. Specifically, expression is evaluated by administering 1 or 3 mg/kg of LNP-g9860 as described in Example 1 and 1.5e13 vg/kg of rAAV8 comprising each optimized template. An LNP with gRNA9844 is also used. Expression is analyzed over a 12-week study. Tissues are also collected for analysis of biodistribution of GAA, and GAA activity is assessed in collected tissues.

### Example 6. Durable Alpha-Glucosidase (GAA) Expression After Insertion of Anti-TfR:GAA DNA Template in Neonatal Mice

[0751] Anti-human transferrin receptor (hTfR) antibodies were generated and screened for the ability to bind hTfR and for lack of strong blocking of human transferrin-hTfR binding. Based on this initial analysis, 32 variable sequences were chosen. See Table 29.

TABLE 29

Domains in Anti-hTfR Antibodies, Antigen-binding Fragments (e.g., Fabs) or scFv Molecules in Fusion Proteins

| # | anti-hTfR Molecule | HC-VR NT | HC-VR AA | HCDR1 | HCDR2 | HCDR3 | LC-VR NT | LC-VR AA | LCDR1 | LCDR2 | LCDR3 |
|---|---|---|---|---|---|---|---|---|---|---|---|
| 1 | 31874B | 216 | 217 | 218 | 219 | 220 | 221 | 222 | 223 | 224 | 225 |
| 2 | 31863B | 226 | 227 | 228 | 229 | 230 | 231 | 232 | 233 | 234 | 235 |
| 3 | 69348 | 236 | 237 | 238 | 239 | 240 | 241 | 242 | 243 | 244 | 245 |
| 4 | 69340 | 246 | 247 | 248 | 249 | 250 | 251 | 252 | 253 | 254 | 255 |
| 5 | 69331 | 256 | 257 | 258 | 259 | 260 | 261 | 262 | 263 | 264 | 265 |
| 6 | 69332 | 266 | 267 | 268 | 269 | 270 | 271 | 272 | 273 | 274 | 275 |
| 7 | 69326 | 276 | 277 | 278 | 279 | 280 | 281 | 282 | 283 | 284 | 285 |
| 8 | 69329 | 286 | 287 | 288 | 289 | 290 | 291 | 292 | 293 | 294 | 295 |
| 9 | 69323 | 296 | 297 | 298 | 299 | 300 | 301 | 302 | 303 | 304 | 305 |
| 10 | 69305 | 306 | 307 | 308 | 309 | 310 | 311 | 312 | 313 | 314 | 315 |
| 11 | 69307 | 316 | 317 | 318 | 319 | 320 | 321 | 322 | 323 | 324 | 325 |
| 12 | 12795B | 326 | 327 | 328 | 329 | 330 | 331 | 332 | 333 | 334 | 335 |
| 13 | 12798B | 336 | 337 | 338 | 339 | 340 | 341 | 342 | 343 | 344 | 345 |
| 14 | 12799B | 346 | 347 | 348 | 349 | 350 | 351 | 352 | 353 | 354 | 355 |
| 15 | 12801B | 356 | 357 | 358 | 359 | 360 | 361 | 362 | 363 | 364 | 365 |
| 16 | 12802B | 366 | 367 | 368 | 369 | 370 | 371 | 372 | 373 | 374 | 375 |
| 17 | 12808B | 376 | 377 | 378 | 379 | 380 | 381 | 382 | 383 | 384 | 385 |
| 18 | 12812B | 386 | 387 | 388 | 389 | 390 | 391 | 392 | 393 | 394 | 395 |
| 19 | 12816B | 396 | 397 | 398 | 399 | 400 | 401 | 402 | 403 | 404 | 405 |
| 20 | 12833B | 406 | 407 | 408 | 409 | 410 | 411 | 412 | 413 | 414 | 415 |
| 21 | 12834B | 416 | 417 | 418 | 419 | 420 | 421 | 422 | 423 | 424 | 425 |
| 22 | 12835B | 426 | 427 | 428 | 429 | 430 | 431 | 432 | 433 | 434 | 435 |
| 23 | 12847B | 436 | 437 | 438 | 439 | 440 | 441 | 442 | 443 | 444 | 445 |
| 24 | 12848B | 446 | 447 | 448 | 449 | 450 | 451 | 452 | 453 | 454 | 455 |
| 25 | 12843B | 456 | 457 | 458 | 459 | 460 | 461 | 462 | 463 | 464 | 465 |
| 26 | 12844B | 466 | 467 | 468 | 469 | 470 | 471 | 472 | 473 | 474 | 475 |
| 27 | 12845B | 476 | 477 | 478 | 479 | 480 | 481 | 482 | 483 | 484 | 485 |
| 28 | 12839B | 486 | 487 | 488 | 489 | 490 | 491 | 492 | 493 | 494 | 495 |
| 29 | 12841B | 496 | 497 | 498 | 499 | 500 | 501 | 502 | 503 | 504 | 505 |
| 30 | 12850B | 506 | 507 | 508 | 509 | 510 | 511 | 512 | 513 | 514 | 515 |
| 31 | 69261 | 516 | 517 | 518 | 519 | 520 | 521 | 522 | 523 | 524 | 525 |
| 32 | 69263 | 526 | 527 | 528 | 529 | 530 | 531 | 532 | 533 | 534 | 535 |

### 31874B

[0752] HCVR (V_{H}) Nucleotide Sequence

GAGGTGCAGCTGGTGGAGTCTGGGGGAGGCTTGGTACAGCCTGGGGGGTC
CCTGAGACTCTCCTGTGCAGCCTCTGGATTCGCCTTTAGCAGCTATGCCA
TGACCTGGGTCCGACAGGCTCCAGGGAAGGGGCTGGAGTGGGTCTCAGTT
ATCAGTGGTACTGGTGGTAGTACATACTACGCAGACTCCGTGAAGGGCCG
GTTCACCATCTCCAGAGACAATTCCAAGAACACGCTGTATCTACAAATGA
ACAGCCTGAGAGCCGAGGACACGGCCGTATATTACTGTGCGAAAGGGGGA
GCAGCTCGTAGAATGGAATACTTCCAGTACTGGGGCCAGGGCACCCTGGT
CACCGTCTCCTCA (SEQ ID NO: 216)

[0753] HCVR (V_{H}) Amino Acid Sequence

EVQLVESGGGLVQPGGSLRLSCAASGFAFSSYAMTWVRQAPGKGLEWVSV
ISGTGGSTYYADSVKGRFTISRDNSKNTLYLQMNSLRAEDTAVYYCAKGG
AARRMEYFQYWGQGTLVTVSS (SEQ ID NO: 217)

HCDR1:GFAFSSYA (SEQ ID NO:218)

HCDR2:ISGTGGST (SEQ ID NO: 219)

HCDR3: AKGGAARRMEYFQY (SEQ ID NO: 220)

[0754] LCVR (V_{L}) Nucleotide Sequence

GACATCCAGATGACCCAGTCTCCATCCTCCCTGTCTGCATCTGTAGGAGA
CAGAGTCACCATCACTTGCCGGGCGAGTCAGGGCATTAGCAATTATTTAG
CCTGGTATCAGCAGAAACCAGGGAAAGTTCCTAACCTCCTTATCTATGCT
GCATCCACTTTGCAATCAGGGGTCCCATCTCGATTCAGTGGCAGTGGATC
TGGGACAGATTTCACTCTCACCATCAGCAGCCTGCAGCCTGAAGATGTTG
CAACTTATTACTGTCAAAAGTATAACAGTGCCCCTCTCACTTTCGGCGGA
GGGACCAAGGTGGAGATCAAA (SEQ ID NO: 221)

[0755] LCVR (V_{L}) Amino Acid Sequence

DIQMTQSPSSLSASVGDRVTITCRASQGISNYLAWYQQKPGKVPNLLIYA
ASTLQSGVPSRFSGSGSGTDFTLTISSLQPEDVATYYCQKYNSAPLTFGG
GTKVEIK (SEQ ID NO: 222)

LCDR1: QGISNY (SEQ ID NO: 223)

LCDR2: AAS (SEQ ID NO: 224)

LCDR3: QKYNSAPLT (SEQ ID NO: 225)

### 31863B

[0756] HCVR (V_{H}) Nucleotide Sequence

GAGGTGCAGCTGGTGGAGTCTGGGGGAGGCTTGGTACAGCCTGGGGGGTC
CCTGAGACTCTCCTGTGCAGCCTCTGGATTCACCTTTAACAGCTATGCCA
TGACCTGGGTCCGCCAGGCTCCAGGGAAGGGGCTGGAGTGGGTCTCATTT
ATTGGTGGTAGTACTGGTAACACATACTACGCAGGCTCCGTGAAGGGCCG
GTTCACCATCTCCAGCGACAATTCCAAGAAGACGCTGTATCTGCAAATGA
ACAGCCTGAGAGCCGAGGACACGGCCGTATATTACTGTGCGAAAGGGGGA
GCAGCTCGTAGAATGGAATACTTCCAGCACTGGGGCCAGGGCACCCTGGT
CACCGTCTCCTCA (SEQ ID NO: 226)

[0757] HCVR (V_{H}) Amino Acid Sequence

EVQLVESGGGLVQPGGSLRLSCAASGFTFNSYAMTWVRQAPGKGLEWVSF
IGGSTGNTYYAGSVKGRFTISSDNSKKTLYLQMNSLRAEDTAVYYCAKGG
AARRMEYFQHWGQGTLVTVSS (SEQ ID NO: 227)

HCDR1: GFTFNSYA (SEQ ID NO: 228)

HCDR2:IGGSTGNT (SEQ ID NO: 229)

HCDR3:AKGGAARRMEYFQH (SEQ ID NO: 230)

[0758] LCVR (V_{L}) Nucleotide Sequence

GACATCCAGATGACCCAGTCTCCATCCTCCCTGTCTGCATCTATAGGAGA
CAGAGTCACCATCACTTGCCGGGCGAGTCAGGGCATTAGCAATTATTTAG
CCTGGTATCAACAGAAACCAGGGAAAGTTCCTAAGCTCCTGATCTATGCT
GCATCCACTTTGCAATCAGGGGTCCCATCTCGGTTCAGTGGCAGTGGATC
TGGGACAGATTTCACTCTCACCATCAGCAGCCTGCAGCCTGAAGATGTTG
CAACTTATTACTGTCAAAACCATAACAGTGTCCCTCTCACTTTCGGCGGA
GGGACCAAGGTGGAGATCAAA (SEQ ID NO: 231)

[0759] LCVR (V_{L}) Amino Acid Sequence

DIQMTQSPSSLSASIGDRVTITCRASQGISNYLAWYQQKPGKVPKLLIYA
ASTLQSGVPSRFSGSGSGTDFTLTISSLQPEDVATYYCQNHNSVPLTFGG
GTKVEIK (SEQ ID NO: 232)

LCDR1: QGISNY (SEQ ID NO: 233)

LCDR2: AAS (SEQ ID NO: 234)

LCDR3: QNHNSVPLT (SEQ ID NO: 235)

### 69348

[0760] HCVR (V_{H}) Nucleotide Sequence

CAGGTGCAGCTGGTGGAGTCTGGGGGAGGCGTGGTCCAGCCTGGGAGGTC
CCTGAGACTCTCCTGTGCAGCGTCTGGATTCACCTTCACTACCTATGGCA
TGCACTGGGTCCGCCAGGCTCCAGGCAAGGGGCTGGAGTGGGTGGCTGTT
ATATGGTATGATGGAAGTAATAAATATTATGGAGACTCCGTGAAGGGCCG
ATTCACCATCTCCAGAGACAATTCCAAGAACACACTGTATCTGCAAATGA
ACAGCCTGAGAGTCGACGACACGGCTGTTTATTACTGTACGAGAACCCAT
GGCTATACCAGGTCGTCGGACGGTTTTGACTACTGGGGCCAGGGAACCCT
GGTCACCGTCTCCTCA(SEQ ID NO: 236)

[0761] HCVR (V_{H}) Amino Acid Sequence

QVQLVESGGGVVQPGRSLRLSCAASGFTFTTYGMHWVRQAPGKGLEWVAV
IWYDGSNKYYGDSVKGRFTISRDNSKNTLYLQMNSLRVDDTAVYYCTRTH
GYTRSSDGFDYWGQGTLVTVSS (SEQ ID NO: 237)

HCDR1:GFTFTTYG (SEQ ID NO: 238)

HCDR2:IWYDGSNK (SEQ ID NO: 239)

HCDR3:TRTHGYTRSSDGFDY (SEQ ID NO: 240)

[0762] LCVR (V_{L}) Nucleotide Sequence

GACATCCAGATGACCCAGTCTCCATCCTCCCTGTCTGCATCTGTAGGAGA
CAGAGTCACCATCACTTGCCGGGCAAGTCAGAGCATTAGAAATGTTTTAG
GCTGGTTTCAGCAGAAACCAGGGAAAGCCCCTCAGCGCCTGATCTATGCT
GCATCCAGTTTGCAAAGTGGGGTCCCATCAAGGTTCAGCGGCAGTGGATC
TGGGACAGAATTCACTCTCACAATCAGCAGCCTACAGCCTGAAGATTTTG
CAACTTATTACTGTCTACAGCATAATTTTTACCCGCTCACTTTCGGCGGA
GGGACCAAGGTGGAGATCAAA (SEQ ID NO: 241)

[0763] LCVR (V_{L}) Amino Acid Sequence

DIQMTQSPSSLSASVGDRVTITCRASQSIRNVLGWFQQKPGKAPQRLIYA
ASSLQSGVPSRFSGSGSGTEFTLTISSLQPEDFATYYCLQHNFYPLTFGG
GTKVEIK (SEQ ID NO: 242)

LCDR1: QSIRNV (SEQ ID NO: 243)

LCDR2: AAS (SEQ ID NO: 244)

LCDR3: LQHNFYPLT (SEQ ID NO: 245)

### 69340

[0764] HCVR (V_{H}) Nucleotide Sequence

GAAGTGCAGCTGGTGGAGTCTGGGGGAGGCTTGGTACAGCCTGGCAGGTC
CCTGAGACTCTCCTGTGCAGCCTCTGGATTCACCTTTGATGATAAAGCCA
TGCACTGGGTCCGGCAAGTTCCAGGGAAGGGCCTGGAATGGATCTCAGGT
ATTAGTTGGAATAGTGGTACTATAGGCTATGCGGACTCTGTGAAGGGCCG
ATTCATCATCTCCAGAGACAACGCCAAGAACTCCCTGTATCTACAAATGA
ACAGTCTGAGAGCTGAGGACACGGCCTTGTATTACTGCGCAAAAGATGGA
GATACCAGTGGCTGGTACTGGTACGGTTTGGACGTCTGGGGCCAAGGGAC
CACGGTCACCGTCTCCTCA (SEQ ID NO: 246)

[0765] HCVR (V_{H}) Amino Acid Sequence

EVQLVESGGGLVQPGRSLRLSCAASGFTFDDKAMHWVRQVPGKGLEWISG
ISWNSGTIGYADSVKGRFIISRDNAKNSLYLQMNSLRAEDTALYYCAKDG
DTSGWYWYGLDVWGQGTTVTVSS (SEQ ID NO: 247)

HCDR1:GFTFDDKA (SEQ ID NO: 248)

HCDR2:ISWNSGTI (SEQ ID NO: 249)

HCDR3:AKDGDTSGWYWYGLDV (SEQ ID NO: 250)

[0766] LCVR (V_{L}) Nucleotide Sequence

GAAATTGTGTTGACACAGTCTCCTGCCACCCTGTCTTTGTCTCCAGGGGA
AAGAGCCACCCTCTCCTGCAGGGCCAGTCAGAGTGTTAGCAGCTACTTAG
CCTGGTACCAACAGAAACCTGGCCAGGCTCCCAGGCTCCTCATCCATGAT
GTATCCAACAGGGCCACTGGCATCCCAGCCAGGTTCAGTGGCAGTGGGTC
TGGGACAGACTTCACTCTCACCATCAGCAGTCTAGAGCCTGAAGATTTTG
TAGTTTATTACTGTCAGCAGCGTAGCGACTGGCCCATCACCTTCGGCCAA
GGGACACGACTGGAGATTAAA (SEQ ID NO: 251)

[0767] LCVR (V_{L}) Amino Acid Sequence

EIVLTQSPATLSLSPGERATLSCRASQSVSSYLAWYQQKPGQAPRLLIHD
VSNRATGIPARFSGSGSGTDFTLTISSLEPEDFVVYYCQQRSDWPITFGQ
GTRLEIK (SEQ ID NO: 252)

LCDR1: QSVSSY (SEQ ID NO: 253)

LCDR2: DVS (SEQ ID NO: 254)

LCDR3: QQRSDWPIT (SEQ ID NO: 255)

### 69331

[0768] HCVR (V_{H}) Nucleotide Sequence

CAGGTGCAGCTGGTGGAGTCTGGGGGAGGCGTGGTCCAGCCTGGGAGGTC
CCTGAGACTCTCCTGTATAGCCTCTGGATTCACCTTCAGTGTCTATGGCA
TTCACTGGGTCCGCCAGGCTCCAGGCAAGGGGCTGGAGTGGATGGCAGTA
ATATCACATGATGGAAATATTAAACACTATGCAGACTCCGTGAAGGGCCG
ATTCACCATCTCCAGAGACAATTCCAAGAACACGCTGTATCTTCAAATTA
ACAGCCTGAGAACTGAGGACACGGCTGTGTATTACTGTGCGAAAGATACC
TGGAACTCCCTTGATACTTTTGATATCTGGGGCCAAGGGACAATGGTCAC
CGTCTCTTCA (SEQ ID NO: 256)

[0769] HCVR (V_{H}) Amino Acid Sequence

QVQLVESGGGVVQPGRSLRLSCIASGFTFSVYGIHWVRQAPGKGLEWMAV
ISHDGNIKHYADSVKGRFTISRDNSKNTLYLQINSLRTEDTAVYYCAKDT
WNSLDTFDIWGQGTMVTVSS (SEQ ID NO: 257)

HCDR1:GFTFSVYG (SEQ ID NO: 258)

HCDR2:ISHDGNIK (SEQ ID NO: 259)

HCDR3:AKDTWNSLDTFDI (SEQ ID NO: 260)

[0770] LCVR (V_{L}) Nucleotide Sequence

GACATCCAGTTGACCCAGTCTCCATCCTCCCTGTCTGCATCTGTAGGAGA
CAGAGTCACCATCACTTGCTGGGCCAGTCAGGGCATTAGCAGTTATTTAG
CCTGGTATCAGCAAAAACCAGGGAAAGCCCCTAAGCTCCTGATCTATGCT
GCATCCACTTTGCAAAGTGGGGTCCCATCAAGGTTCAGCGGCAGTGGATC
TGGGACAGAATTCACTCTCACAATCAGCAGCCTGCAGCCTGAAGATTTTG
CAACTTATTACTGTCAACAGCTTAATAGTTACCCTCTCACTTTCGGCGGA
GGGACCAAGGTGGAGATCAAA (SEQ ID NO: 261)

[0771] LCVR (V_{L}) Amino Acid Sequence

DIQLTQSPSSLSASVGDRVTITCWASQGISSYLAWYQQKPGKAPKLLIYA
ASTLQSGVPSRFSGSGSGTEFTLTISSLQPEDFATYYCQQLNSYPLTFGG
GTKVEIK (SEQ ID NO: 262)

LCDR1: QGISSY (SEQ ID NO: 263)

LCDR2: AAS (SEQ ID NO: 264)

LCDR3: QQLNSYPLT (SEQ ID NO: 265)

### 69332

[0772] HCVR (V_{H}) Nucleotide Sequence

CAGGTCACCTTGAGGGAGTCTGGTCCCGCGCTGGTGAAACCCTCACAGAC
CCTCACACTGACCTGCACCTTCTCTGGATTCTCACTCAACACTTATGGGA
TGTTTGTGAGCTGGATCCGTCAGCCTCCAGGGAAGGCCCTAGAGTGGCTT
GCACACATTCATTGGGATGATGATAAATACTACAGCACATCTCTGAAGAC
CAGGCTCACCATCTCCAAGGACACCTCCAAAAACCAGGTGGTCCTTACAA
TGACCAACATGGACCCTGTGGACACAGCCACGTATTATTGTGCACGGGGG
CACAATAATTTGAACTACATCATCCACTGGGGCCAGGGAACCCTGGTCAC
CGTCTCCTCA (SEQ ID NO: 266)

[0773] HCVR (V_{H}) Amino Acid Sequence

QVTLRESGPALVKPSQTLTLTCTFSGFSLNTYGMFVSWIRQPPGKALEWL
AHIHWDDDKYYSTSLKTRLTISKDTSKNQVVLTMTNMDPVDTATYYCARG
HNNLNYIIHWGQGTLVTVSS (SEQ ID NO: 267)

HCDR1:GFSLNTYGMF (SEQ ID NO: 268)

HCDR2:IHWDDDK (SEQ ID NO: 269)

HCDR3:ARGHNNLNYIIH (SEQ ID NO: 270)

[0774] LCVR (V_{L}) Nucleotide Sequence

GCCATCCAGATGACCCAGTCTCCATCCTCCCTGTCTGCATCTGTAGGAGA
CAGAGTCACCATCACTTGCCGGGCAAGTCAGGGCATTAGAAATGATTTAG
GCTGGTATCAGCAGAAACCAGGGAAAGCCCCTAAGCTCCTGATCTATGCT
GCATCCACTTTACAAAGTGGGGTCCCATCAAGGTTCAGCGGCAGTGGATC
TGGCACAGATTTCACTCTCACCATCAGCAGCCTGCAGCCTGAAGATTTTG
CAACTTATTACTGTCTACAAGATTACAATTACCCATTCACTTTCGGCCCT
GGGACCAAAGTGGATATCAAA (SEQ ID NO: 271)

[0775] LCVR (V_{L}) Amino Acid Sequence

AIQMTQSPSSLSASVGDRVTITCRASQGIRNDLGWYQQKPGKAPKLLIYA
ASTLQSGVPSRFSGSGSGTDFTLTISSLQPEDFATYYCLQDYNYPFTFGP
GTKVDIK (SEQ ID NO: 272)

LCDR1: QGIRND (SEQ ID NO: 273)

LCDR2: AAS (SEQ ID NO: 274)

LCDR3: LQDYNYPFT (SEQ ID NO: 275)

### 69326

[0776] HCVR (V_{H}) Nucleotide Sequence

GAGGTGCAGCTGGTGGAGTCTGGGGGAGGCTTGGTACAGCCTGGAGGGTC
CCTGAGACTCTCCTGTGCAGTCTCTGGATTCATCTTCAGTAGTTATGAAA
TGAACTGGGTCCGCCAGGCTCCAGGGAAGGGGCTGGAGTGGGTTTCATAC
ATTAGTAGTAGTGGTAGTACCATATTCTACGCAGACTCTGTGAAGGGCCG
ATTCACCATCTCCAGAGACAACGCCAAGAACTCACTGTATCTGCAAATGA
ACAGCCTGAGAGCCGAGGACACGGCTGTTTATTACTGTGTGTCTGGAGTG
GTCCTTTTTGATGTCTGGGGCCAAGGGACAATGGTCACCGTCTCTTCA (
SEQ ID NO: 276)

[0777] HCVR (V_{H}) Amino Acid Sequence

EVQLVESGGGLVQPGGSLRLSCAVSGFIFSSYEMNWVRQAPGKGLEWVSY
ISSSGSTIFYADSVKGRFTISRDNAKNSLYLQMNSLRAEDTAVYYCVSGV
VLFDVWGQGTMVTVSS (SEQ ID NO: 277)

HCDR1:GFIFSSYE (SEQ ID NO: 278)

HCDR2:ISSSGSTI (SEQ ID NO: 279)

HCDR3:VSGVVLFDV (SEQ ID NO: 280)

[0778] LCVR (V_{L}) Nucleotide Sequence

GAAATAGTGATGACGCAGTCTCCAGCCACCCTGTCTGTGTCTCCGGGGGA
AAGAGCCACCCTCTCCTGCAGGGCCAGTCAGAGTGTTAGCAGCAACTTTG
CCTGGTACCAACAGAAACCTGGCCAGGCTCCCAGGCTCCTCATCTATAGT
GCATCCTCCAGGGCCACTGGTATCCCAGTCAGGTTCAGTGGCAGTGGGTC
TGGGACAGAGTTCACTCTCACCATCAGCAGCCTGCAGTCTGAAGATTTTG
CAGTTTATTACTGTCAGCAGTATAATATCTGGCCTCGGACGTTCGGCCAA
GGGACCAAGGTGGAAATCAAA (SEQ ID NO: 281)

[0779] LCVR (V_{L}) Amino Acid Sequence

EIVMTQSPATLSVSPGERATLSCRASQSVSSNFAWYQQKPGQAPRLLIYS
ASSRATGIPVRFSGSGSGTEFTLTISSLQSEDFAVYYCQQYNIWPRTFGQ
GTKVEIK (SEQ ID NO: 282)

LCDR1: QSVSSN (SEQ ID NO: 283)

LCDR2: SAS (SEQ ID NO: 284)

LCDR3: QQYNIWPRT (SEQ ID NO: 285)

### 69329

[0780] HCVR (V_{H}) Nucleotide Sequence

GAGGTGCAGCTGGTGGAGTCTGGGGGAGGCTTGGTCCAGCCTGGGGGGTC
CCTGAGACTCTCCTGTGCAGCCTCTGGATTCACCTTTAGTAACTATTGGA
TGACCTGGGTCCGCCAGGCTCCAGGGAAGGGGCTGGAGTGGGTGGCCAAC
ATAAAGGAAGATGGAAGTGAGAAAGACTATGTGGACTCTGTGAAGGGCCG
ATTCACCATCTCCAGAGACAACGCCAAGAACTCACTGTATCTGCAAATGA
ACAGCCTGAGAGGCGAGGACACGGCTGTGTATTACTGTGCGAGAGATGGG
GAGCAGCTCGTCGATTACTACTACTACTACGTTATGGACGTCTGGGGCCA
AGGGACCACGGTCACCGTCTCCTCA (SEQ ID NO: 286)

[0781] HCVR (V_{H}) Amino Acid Sequence

EVQLVESGGGLVQPGGSLRLSCAASGFTFSNYWMTWVRQAPGKGLEWVAN
IKEDGSEKDYVDSVKGRFTISRDNAKNSLYLQMNSLRGEDTAVYYCARDG
EQLVDYYYYYVMDVWGQGTTVTVSS (SEQ ID NO: 287)

HCDR1:GFTFSNYW (SEQ ID NO: 288)

HCDR2:IKEDGSEK (SEQ ID NO: 289)

HCDR3:ARDGEQLVDYYYYYVMDV (SEQ ID NO: 290)

[0782] LCVR (V_{L}) Nucleotide Sequence

GACATCCAGATGACCCAGTCTCCATCTTCCGTGTCTGCATCTGTAGGAGA
CAGAGTCACCATCACTTGTCGGGCGAGTCAGGGTATTAGCAGCTGGTTAG
CCTGGTATCAGCAGAAACCAGGGAAAGCCCCTAAGCTCCTGATCTATGCT
GCATCCAGTTTGCAAAGTGGGGTCCCATCAAGGTTCAGCGGCAGTGGATC
TGGGACAGATTTCACTCTCACCATCAGCAGCCTGCAGCCTGAAGATTTTG
CAACTTACTATTGTCAAAAGGCTAACAGTTTCCCGTACACTTTTGGCCAG
GGGACCAAGCTGGAGATCAAA (SEQ ID NO: 291)

[0783] LCVR (V_{L}) Amino Acid Sequence

DIQMTQSPSSVSASVGDRVTITCRASQGISSWLAWYQQKPGKAPKLLIYA
ASSLQSGVPSRFSGSGSGTDFTLTISSLQPEDFATYYCQKANSFPYTFGQ
GTKLEIK (SEQ ID NO: 292)

LCDR1: QGISSW (SEQ ID NO: 293)

LCDR2: AAS (SEQ ID NO: 294)

LCDR3: QKANSFPYT (SEQ ID NO: 295)

### 69323 (REGN16816 anti-hTfR scFv:hGAA)

[0784] HCVR (V_{H}) Nucleotide Sequence

GAAGTGCAGCTGGTGGAGTCTGGGGGAGGCTTGGTACAGCCTGGCAGGTC
CCTGAGACTCTCCTGTGCAGCCTCTGGATTCACCTTTGATGACTATGCCA
TGCACTGGGTCCGGCAAGCTCCAGGGAAGGGCCTGGAGTGGGTCTCAGGT
ATTAGTTGGAATAGTGGTTACATAGGCTATGCGGACTCTGTGAAGGGCCG
ATTCACCATCTCCAGAGACAACGCCGAGAACTCCCTACATCTGCAAATGA
ACAGTCTGAGAGCTGAGGACACGGCCTTGTATTACTGTGCAAGAGGGGGA
TCTACTCTGGTTCGGGGAGTTAAGGGAGGCTACTACGGTATGGACGTCTG
GGGCCAAGGGACCACGGTCACCGTCTCCTCA (SEQ ID NO: 296)

[0785] HCVR (V_{H}) Amino Acid Sequence

EVQLVESGGGLVQPGRSLRLSCAASGFTFDDYAMHWVRQAPGKGLEWVSG
ISWNSGYIGYADSVKGRFTISRDNAENSLHLQMNSLRAEDTALYYCARGG
STLVRGVKGGYYGMDVWGQGTTVTVSS (SEQ ID NO:297)

HCDR1:GFTFDDYA (SEQ ID NO: 298)

HCDR2:ISWNSGYI (SEQ ID NO: 299)

HCDR3:ARGGSTLVRGVKGGYYGMDV (SEQ ID NO: 300)

[0786] LCVR (V_{L}) Nucleotide Sequence

GACATCCAGATGACCCAGTCTCCATCCTCCCTGTCTGCATCTGTAGGAGA
CAGAGTCACCATCACTTGCCGGGCAAGTCAGAGCATAAGTAGCTATTTAA
ATTGGTATCAGCAGAAACCAGGTAAAGCCCCTAAGGTCCTGATCTATGCT
GCATCCAGTTTGCAAAGTGGGGTCCCATCAAGGTTCAGTGGCAGTGGATC
TGGGACAGATTTCACTCTCACCATCAGCAGTCTGCAACCTGAAGATTTTG
CAACTTACTACTGTCAACAGAGTTACAGTATTCCGCTCACTTTCGGCGGA
GGGACCAAGGTGGAGATCAAA (SEQ ID NO: 301)

[0787] LCVR (V_{L}) Amino Acid Sequence

DIQMTQSPSSLSASVGDRVTITCRASQSISSYLNWYQQKPGKAPKVLIYA
ASSLQSGVPSRFSGSGSGTDFTLTISSLQPEDFATYYCQQSYSIPLTFGG
GTKVEIK (SEQ ID NO: 302)

LCDR1: QSISSY (SEQ ID NO: 303)

LCDR2: AAS (SEQ ID NO: 304)

LCDR3: QQSYSIPLT (SEQ ID NO: 305)

### 69305

[0788] HCVR (V_{H}) Nucleotide Sequence

CAGGTGCAGCTGGTGGAGTCTGGGGGAGGCGTGGTCCAGCCTGGGAGGTC
CCTGAGACTCTCCTGTGCAGCGTCTGGATTCACCTTCAGTAGCTATGGCA
TGCACTGGGTCCGCCAGGCTCCAGGCAAGGGGCTGGAGTGGGTGGCAGTT
ATATGGTATGATGGAAGTAATAAATACTATGCAGACTCCGTGAAGGGCCG
ATTCACCATCTCCAGAGACATTTCCAAGAACACGCTGTATCTGCAAATGA
ACAGCCTGAGAGCCGAGGACACGGCCGTATATTACTGTGCGGGTCAACTG
GATCTCTTCTTTGACTACTGGGGCCAGGGAACCCTGGTCACCGTCTCCTC
A (SEQ ID NO: 306)

[0789] HCVR (V_{H}) Amino Acid Sequence

QVQLVESGGGVVQPGRSLRLSCAASGFTFSSYGMHWVRQAPGKGLEWVAV
IWYDGSNKYYADSVKGRFTISRDISKNTLYLQMNSLRAEDTAVYYCAGQL
DLFFDYWGQGTLVTVSS (SEQ ID NO: 307)

HCDR1:GFTFSSYG (SEQ ID NO: 308)

HCDR2:IWYDGSNK (SEQ ID NO: 309)

HCDR3: AGQLDLFFDY (SEQ ID NO: 310)

[0790] LCVR (V_{L}) Nucleotide Sequence

GACATCCAGATGACCCAGTCTCCATCCTCCCTGTCTGCATCTGTAGGAGA
CAGAGTCACCATCACTTGCCGGGCAAGTCAGAGCATTGACAGGTATTTAA
ATTGGTATCGGCAGAAACCAGGGAAAGCCCCTAAGCTCCTGATCTATACT
ACATCCAGTTTGCAAAGTGGGGTCCCATCAAGGTTCAGTGGCAGTGGATC
TGGGACAGATTTCACTCTCACCCTCAGCAGTCTGCAGCCTGAAGATTTTG
CAACTTACTACTGTCAGCAGAGTTACAGTCCCCCGCTCACTTTCGGCGGA
GGGACCAAGGTGGAGATCAAA (SEQ ID NO: 311)

[0791] LCVR (V_{L}) Amino Acid Sequence

DIQMTQSPSSLSASVGDRVTITCRASQSIDRYLNWYRQKPGKAPKLLIYT
TSSLQSGVPSRFSGSGSGTDFTLTLSSLQPEDFATYYCQQSYSPPLTFGG
GTKVEIK (SEQ ID NO: 312)

LCDR1: QSIDRY (SEQ ID NO: 313)

LCDR2: TTS (SEQ ID NO: 314)

LCDR3: QQSYSPPLT (SEQ ID NO: 315)

### 69307 (REGN16817 Anti-hTfR scFv:hGAA)

[0792] HCVR (V_{H}) Nucleotide Sequence

GAGGTGCAGCTGGTGGAGTCTGGGGGAGGCTTGGTCCAGCCTGGGGGGTC
CCTGAGACTCTCCTGTACAGCCTCTGGATTCACCTTTAGTAACTATTGGA
TGACCTGGGTCCGCCAGGCTCCAGGGAAGGGGCTGGAGTGGGTGGCCAAC
ATAAAGGAAGATGGAAGTGAGAAAGAGTATGTGGACTCTGTGAAGGGCCG
GTTCACCATCTCCAGAGACAACGCCAAGAATTCACTGTATCTGCAAATGA
ACAGCCTGAGAGGCGAGGACACGGCTGTATATTACTGTGCGAGAGATGGG
GAGCAGCTCGTCGATTACTATTACTACTACGTTATGGACGTCTGGGGCCA
AGGGACCACGGTCACCGTCTCCTCA (SEQ ID NO: 316)

[0793] HCVR (V_{H}) Amino Acid Sequence

EVQLVESGGGLVQPGGSLRLSCTASGFTFSNYWMTWVRQAPGKGLEWVAN
IKEDGSEKEYVDSVKGRFTISRDNAKNSLYLQMNSLRGEDTAVYYCARDG
EQLVDYYYYYVMDVWGQGTTVTVSS (SEQ ID NO: 317)

HCDR1:GFTFSNYW (SEQ ID NO: 318)

HCDR2:IKEDGSEK (SEQ ID NO: 319)

HCDR3:ARDGEQLVDYYYYYVMDV (SEQ ID NO: 320)

[0794] LCVR (V_{L}) Nucleotide Sequence

GACATCCAGATGACCCAGTCTCCATCTTCCGTGTCTGCATCTGTTGGAGA
CAGAGTCACCATCACTTGTCGGGCGAGTCAGGGTATTAGCAGCTGGTTAG
CCTGGTATCAGCAGAAACCAGGGAAAGCCCCTAAGCTCCTGATCTATGCT
GCATCCAGTTTGCAAAGTGGGGTCCCATCAAGGTTCAGCGGCAGTGGATC
TGGGACAGATTTCACTCTCACCATCAGCAGCCTGCAGCCTGAAGATTTTG
CAACTTACTATTGTCAAAAGGCTGACAGTCTCCCGTACGCTTTTGGCCAG
GGGACCAAGCTGGAGATCAAA (SEQ ID NO: 321)

[0795] LCVR (V_{L}) Amino Acid Sequence

DIQMTQSPSSVSASVGDRVTITCRASQGISSWLAWYQQKPGKAPKLLIYA
ASSLQSGVPSRFSGSGSGTDFTLTISSLQPEDFATYYCQKADSLPYAFGQ
GTKLEIK (SEQ ID NO: 322)

LCDR1: QGISSW (SEQ ID NO: 323)

LCDR2: AAS (SEQ ID NO: 324)

LCDR3: QKADSLPYA (SEQ ID NO: 325)

### 12795B

[0796] HCVR (V_{H}) Nucleotide Sequence

GAGGTGCAGCTGGTGGAGTCTGGGGGAGGCTTGGTTCAGCCTGGGGGGTC
CCTGAGACTCTCCTGTGCAACCTCTGGATTCACCTTTACCAGCTATGACA
TGAAGTGGGTCCGCCAGGCTCCAGGGCTGGGCCTGGAGTGGGTCTCAGCT
ATTAGTGGTAGTGGTGGTAACACATACTACGCAGACTCCGTGAAGGGCCG
GTTCACCATCTCCAGAGACAATTCCAGGAACACGCTGTATCTGCAAATGA
ACAGCCTGAGAGCCGAGGACACGGCCGTATATTACTGTACGAGGTCCCAT
GACTTCGGTGCCTTCGACTACTTTGACTACTGGGGCCAGGGAACCCTGGT
CACCGTCTCCTCA (SEQ ID NO: 326)

[0797] HCVR (V_{H}) Amino Acid Sequence

EVQLVESGGGLVQPGGSLRLSCATSGFTFTSYDMKWVRQAPGLGLEWVSA
ISGSGGNTYYADSVKGRFTISRDNSRNTLYLQMNSLRAEDTAVYYCTRSH
DFGAFDYFDYWGQGTLVTVSS (SEQ ID NO: 327)

HCDR1:GFTFTSYD (SEQ ID NO: 328)

HCDR2:ISGSGGNT (SEQ ID NO: 329)

HCDR3:TRSHDFGAFDYFDY (SEQ ID NO: 330)

[0798] LCVR (V_{L}) Nucleotide Sequence

GACATCCAGATGACCCAGTCTCCATCCTCCCTGTCTGCATCTGTGGGAGA
CAGAGTCACCATCACTTGCCGGGCAAGTCAGGGCATTAGAGATCATTTTG
GCTGGTATCAGCAGAAACCAGGGAAAGCCCCTAAGCGCCTGATCTATGCT
GCATCCAGTTTGCACAGTGGGGTCCCATCAAGGTTCAGCGGCAGTGGATC
TGGGACAGAATTCACTCTCACAATCAGCAGCTTGCAGCCTGAAGATTTTG
CAACCTATTACTGTCTACAGTATGATACTTACCCGCTCACTTTCGGCGGA
GGGACCAAGGTGGAGATCAAA (SEQ ID NO: 331)

[0799] LCVR (V_{L}) Amino Acid Sequence

DIQMTQSPSSLSASVGDRVTITCRASQGIRDHFGWYQQKPGKAPKRLIYA
ASSLHSGVPSRFSGSGSGTEFTLTISSLQPEDFATYYCLQYDTYPLTFGG
GTKVEIK (SEQ ID NO: 332)

LCDR1: QGIRDH (SEQ ID NO: 333)

LCDR2: AAS (SEQ ID NO: 334)

LCDR3: LQYDTYPLT (SEQ ID NO: 335)

### 12798B (REGN17078 Fab; REGN17072 scFv; REGN16818 Anti-hTfR scFv:hGAA)

[0800] HCVR (V_{H}) Nucleotide Sequence

GAAGTGCAGCTGGTGGAGTCTGGGGGAGACTTGGTACAGCCTGGCAGGTC
CCTGAGACTCTCCTGTGCAGCCTCTGGATTCACCTTTGATGATTATGCCA
TGCACTGGGTCCGGCAAGCTCCAGGGAAGGGCCTGGAGTGGGTCTCAGGT
ATTAGTTGGAATAGTGCTACCAGAGTCTATGCGGACTCTGTGAAGGGCCG
ATTCACCATCTCCAGAGACAACGCCAAGAATTTCCTGTATCTGCAAATGA
ACAGTCTGAGATCTGAGGACACGGCCTTGTATCACTGTGCAAAAGATATG
GATATCTCGCTAGGGTACTACGGTTTGGACGTCTGGGGCCAAGGGACCAC
GGTCACCGTCTCCTCA (SEQ ID NO: 336)

[0801] HCVR (V_{H}) Amino Acid Sequence

EVQLVESGGDLVQPGRSLRLSCAASGFTFDDYAMHWVRQAPGKGLEWVSG
ISWNSATRVYADSVKGRFTISRDNAKNFLYLQMNSLRSEDTALYHCAKDM
DISLGYYGLDVWGQGTTVTVSS (SEQ ID NO: 337)

HCDR1:GFTFDDYA (SEQ ID NO: 338)

HCDR2:ISWNSATR (SEQ ID NO: 339)

HCDR3:AKDMDISLGYYGLDV (SEQ ID NO: 340)

[0802] LCVR (V_{L}) Nucleotide Sequence

GAAATAGTGATGACGCAGTCTCCAGCCACCCTGTCTGTGTCTCCAGGGGA
AAGAGCCACCCTCTCCTGCAGGGCCAGTCAGACTGTTAGCAGCAACTTAG
CCTGGTATCAGCAGAAACCTGGCCAGGCTCCCAGGCTCCTCATCTATGGT
TCATCCTCCAGGGCCACTGGTATCCCAGCCAGGTTCAGTGGCAGTGGGTC
TGGGACAGAGTTCACTCTCACCATCAGCAGCCTGCAGTCTGAAGATTTTG
CAGTTTATTACTGTCAGCAGTATAATAACTGGCCTCCCTACACTTTTGGC
CAGGGGACCAAGCTGGAGATCAAA (SEQ ID NO: 341)

[0803] LCVR (V_{L}) Amino Acid Sequence

EIVMTQSPATLSVSPGERATLSCRASQTVSSNLAWYQQKPGQAPRLLIYG
SSSRATGIPARFSGSGSGTEFTLTISSLQSEDFAVYYCQQYNNWPPYTFG
QGTKLEIK (SEQ ID NO: 342)

LCDR1: QTVSSN (SEQ ID NO: 343)

LCDR2: GSS (SEQ ID NO: 344)

LCDR3: QQYNNWPPYT (SEQ ID NO: 345)

### 12799B (REGN17079 Fab; REGN17073 scFv; REGN16819 Anti-hTfR scFv:hGAA)

[0804] HCVR (V_{H}) Nucleotide Sequence

CAGATCACCTTGAAGGAGTCTGGTCCTACGCTGGTGAAACCCACACAGAC
CCTCACGCTGACCTGCACCTTCTCTGGGTTCTCACTCAGCACTAGTGGAG
TGGGTGTGGTCTGGATCCGTCAGCCCCCCGGAAAGGCCCTGGAGTGGCTT
GCACTCATTTATTGGAATGATCATAAGCGGTACAGCCCATCTCTGGGGAG
CAGGCTCACCATCACCAAGGACACCTCCAAAAACCAGGTGGTCCTTACAA
TGACCAACATGGACCCTGTGGACACAGCCACATATTACTGTGCACACTAC
AGTGGGAGCTATTCCTACTACTACTATGGTTTGGACGTCTGGGGCCAAGG
GACCACGGTCACCGTCTCCTCA (SEQ ID NO: 346)

[0805] HCVR (V_{H}) Amino Acid Sequence

QITLKESGPTLVKPTQTLTLTCTFSGFSLSTSGVGVVWIRQPPGKALEWL
ALIYWNDHKRYSPSLGSRLTITKDTSKNQVVLTMTNMDPVDTATYYCAHY
SGSYSYYYYGLDVWGQGTTVTVSS (SEQ ID NO: 347)

HCDR1:GFSLSTSGVG (SEQ ID NO: 348)

HCDR2:IYWNDHK (SEQ ID NO: 349)

HCDR3:AHYSGSYSYYYYGLDV (SEQ ID NO: 350)

[0806] LCVR (V_{L}) Nucleotide Sequence

GACATCCAGATGACCCAGTCTCCATCTTCCGTGTCTGCATCTGTAGGAGA
CAGAGTCACCATCACTTGTCGGGCGAGTCAGGGTATTGCCAGCTGGTTAG
CCTGGTATCAGCAGAAACCAGGGAAAGCCCCTGAGCTCCTGATCTATGCT
GCATCCAGTTTGCAAGGTGGGGTCCCATCAAGGTTCAGCGGCAGTGGATC
TGGGACAGATTTCACTCTCACCATCAGCAGCCTGCAGCCTGAAGATTTTG
CAATTTACTATTGTCAACAGGCTAACTATTTCCCGTGGACGTTCGGCCAA
GGGACCAAGGTGGAAATCAAA (SEQ ID NO: 351)

[0807] LCVR (V_{L}) Amino Acid Sequence

DIQMTQSPSSVSASVGDRVTITCRASQGIASWLAWYQQKPGKAPELLIYA
ASSLQGGVPSRFSGSGSGTDFTLTISSLQPEDFAIYYCQQANYFPWTFGQ
GTKVEIK (SEQ ID NO: 352)

LCDR1: QGIASW (SEQ ID NO: 353)

LCDR2: AAS (SEQ ID NO: 354)

LCDR3: QQANYFPWT (SEQ ID NO: 355)

### 12801B

[0808] HCVR (V_{H}) Nucleotide Sequence

GAGGTGCAGCTGTTGGAGTCTGGGGGAGCCTTGGTACAGCCTGGGGGGTC
CCTGAGACTCTCCTGTGCAGCCTCTGGATTCACCTTTACCTCCTATGCCA
TGCACTGGGTCCGCCAGGCTCCAGGGAAGGGTCTGGAGTGGGTCTCATCT
ATTAGAGGTAGTGGTGGTGGCACATACTCCGCAGACTCCGTGAAGGGCCG
GTTCACCATCTCCAGAGACAATTCCAGGGACACTCTATATCTGCAAATGA
ACAGTGTGAGAGCCGAGGACACGGCCGTTTATTACTGTGCGAGGTCCCAT
GACTACGGTGCCTTCGACTTCTTTGACTACTGGGGCCAGGGAACCCTGGT
CACCGTCTCCTCA (SEQ ID NO: 356)

[0809] HCVR (V_{H}) Amino Acid Sequence

EVQLLESGGALVQPGGSLRLSCAASGFTFTSYAMHWVRQAPGKGLEWVSS
IRGSGGGTYSADSVKGRFTISRDNSRDTLYLQMNSVRAEDTAVYYCARSH
DYGAFDFFDYWGQGTLVTVSS (SEQ ID NO: 357)

HCDR1:GFTFTSYA (SEQ ID NO: 358)

HCDR2:IRGSGGGT (SEQ ID NO: 359)

HCDR3:ARSHDYGAFDFFDY (SEQ ID NO: 360)

[0810] LCVR (V_{L}) Nucleotide Sequence

GACATCCAGATGACCCAGTCTCCATCCTCCCTGTCTGCATCTGTAGGAGA
CAGAGTCACCATCACTTGCCGGGCAAGTCAGGGCATTAGAACTGATTTAG
GCTGGTATCAGCAGAAACCAGGGAAAGCCCCTAAGCGCCTGATCTATGCT
GCATCCAGTTTGCAAAGTGGGGTCCCATCAAGGTTCAGCGGCAGTGGATC
TGGGACAGAATTCACTCTCACAATCAGCAGCCTGCGGCCTGAAGATTTTG
CAACTTTTTACTGTCTACAGTATAATAGTTACCCGCTCACTTTCGGCGGA
GGGACCAAGGTGGAGATCAAA (SEQ ID NO: 361)

[0811] LCVR (V_{L}) Amino Acid Sequence

DIQMTQSPSSLSASVGDRVTITCRASQGIRTDLGWYQQKPGKAPKRLIYA
ASSLQSGVPSRFSGSGSGTEFTLTISSLRPEDFATFYCLQYNSYPLTFGG
GTKVEIK (SEQ ID NO: 362)

LCDR1: QGIRTD (SEQ ID NO: 363)

LCDR2: AAS (SEQ ID NO: 364)

LCDR3: LQYNSYPLT (SEQ ID NO: 365)

### 12802B (REGN16820 Anti-hTfR scFv:hGAA)

[0812] HCVR (V_{H}) Nucleotide Sequence

CAGGTGCAGCTGGTGGAGTCTGGGGGAGGCTTGGTCAAGCCTGGAGGGTC
CCTGAGACTCTCCTGTGCAGCCTCTGGATTCACCTTCAGTGACTACTTCA
TGAGCTGGATCCGCCAGGCTCCAGGGAAGGGGCTGGAGTGGGTTTCATAC
ATTAGTAGTACTGGTAGTACCATAAATTATGCAGACTCTGTGAAGGGCCG
ATTCACCATCTCCAGGGACAATGTCAAGAATTCACTGTATCTGCAAATGA
CCAGCCTGAGAGTCGAGGACACGGCCGTGTATTACTGTACGAGAGATAAC
TGGAACTATGAATACTGGGGCCAGGGAACCCTGGTCACCGTCTCCTCA (
SEQ ID NO: 366)

[0813] HCVR (V_{H}) Amino Acid Sequence

QVQLVESGGGLVKPGGSLRLSCAASGFTFSDYFMSWIRQAPGKGLEWVSY
ISSTGSTINYADSVKGRFTISRDNVKNSLYLQMTSLRVEDTAVYYCTRDN
WNYEYWGQGTLVTVSS (SEQ ID NO: 367)

HCDR1:GFTFSDYF (SEQ ID NO: 368)

HCDR2:ISSTGSTI (SEQ ID NO: 369)

HCDR3:TRDNWNYEY (SEQ ID NO: 370)

[0814] LCVR (V_{L}) Nucleotide Sequence

GAAATAGTGATGACGCAGTCTCCAGCCACCCTGTCTGTGTCTCCAGGGGA
AAGAGCCACCCTCTCCTGCAGGGCCAGTCAGAGTGTTAGCATCAACTTAG
CCTGGTACCAGCAGAAACCTGGCCAGGCTCCCAGGCTCCTCATCTTTGTT
GCATCCACCAGGGCCACTGGTATCCCAGCCAGGTTCAGTGGCAGTGGGTC
TGGGACAGAGTTCACTCTCACCATCAGCAGCCTGCAGTCTGAAGATTTTG
CAACTTATTACTGTCAGCAGTATGATATCTGGCCGTACACTTTTGGCCAG
GGGACCAAGCTGGAGATCAAA (SEQ ID NO: 371)

[0815] LCVR (V_{L}) Amino Acid Sequence

EIVMTQSPATLSVSPGERATLSCRASQSVSINLAWYQQKPGQAPRLLIFV
ASTRATGIPARFSGSGSGTEFTLTISSLQSEDFATYYCQQYDIWPYTFGQ
GTKLEIK (SEQ ID NO: 372)

LCDR1: QSVSIN (SEQ ID NO: 373)

LCDR2: VAS (SEQ ID NO: 374)

LCDR3: QQYDIWPYT (SEQ ID NO: 375)

### 12808B

[0816] HCVR (V_{H}) Nucleotide Sequence

CAGCTGCAGCTGCAGGAGTCGGGCCCAGGACTGGTGAAGCCTTCGGAGAC
CCTGTCCCTCACCTGCACTGTGTCTGGTGAATCCATCAGCAGTAATACTT
ACTACTGGGGCTGGATCCGCCAGCCCCCAGGGAAGGGGCTGGAATGGATT
GGGAGTATCGATTATAGTGGGACCACCAATTATAACCCGTCCCTCAAGAG
TCGAGTCACCATATCCGTAGACACGTCCAGGAATCACTTCTCCCTGAGGC
TGAGGTCTGTGACCGCCGCAGACACGGCTGTGTATTACTGTGCGAGAGAG
TGGGGAAACTACGGCTACTATTACGGTATGGACGTTTGGGGCCAAGGGAC
CACGGTCACCGTCTCCTCA (SEQ ID NO: 376)

[0817] HCVR (V_{H}) Amino Acid Sequence

QLQLQESGPGLVKPSETLSLTCTVSGESISSNTYYWGWIRQPPGKGLEWI
GSIDYSGTTNYNPSLKSRVTISVDTSRNHFSLRLRSVTAADTAVYYCARE
WGNYGYYYGMDVWGQGTTVTVSS (SEQ ID NO: 377)

HCDR1:GESISSNTYY (SEQ ID NO: 378)

HCDR2:IDYSGTT (SEQ ID NO: 379)

HCDR3:AREWGNYGYYYGMDV (SEQ ID NO: 380)

[0818] LCVR (V_{L}) Nucleotide Sequence

GACATCCAGATGACCCAGTCTCCATCCTCCCTGTCTGCATCTGTAGGAGA
CAGAGTCACCATCAATTGCCGGGCAAGTCAGGGCATTAGAAATGATTTAG
GCTGGTATCAGCAGAAACCAGGGAAAGCCCCTAAGCGCCTGATCTATGCT
GCATCCAGTTTGCAAAGTGGGGTCCCATTAAGGTTCAGTGGCAGTGGATC
TGGGACAGAATTCACTCTCACAATCAACAACCTGCAGCCTGAAGATTTTG
CAACTTATTACTGTCTATCGCATAATAGTTACCCGTGGACGTTCGGCCAA
GGGACCAAGGTGGAAATCAAA (SEQ ID NO: 381)

[0819] LCVR (V_{L}) Amino Acid Sequence

DIQMTQSPSSLSASVGDRVTINCRASQGIRNDLGWYQQKPGKAPKRLIYA
ASSLQSGVPLRFSGSGSGTEFTLTINNLQPEDFATYYCLSHNSYPWTFGQ
GTKVEIK (SEQ ID NO: 382)

LCDR1: QGIRND (SEQ ID NO: 383)

LCDR2: AAS (SEQ ID NO: 384)

LCDR3: LSHNSYPWT (SEQ ID NO: 385)

### 12812B (REGN16821 Anti-hTfR scFv:hGAA)

[0820] HCVR (V_{H}) Nucleotide Sequence

CAGGTGCAGCTGGTGCAGTCTGGGGCTGAGGTGAAGAAGCCTGGGTCCTC
GGTGAGGGTCTCCTGCAAGGCTTCTAGAGGCACCTTCAGCAGCTATGCTA
TCAGCTGGGTGCGACAGGCCCCTGGACAAGGCCTTGAGTGGATGGGAGGG
ATCATCCCCATCTTTGGTACAGCAAACTACGCACAGAAGTTCCTGGCCAG
AGTCACGATTACCGCGGACGAATCCACGAGCACAGCCTACATGGAGCTGA
GCAGCCTGAGATCTGAGGACACGGCCGTGTATTACTGTGCGAGAGAGAAG
GGGTGGAACTACTTTGACTACTGGGGCCAGGGAACCCTGGTCACCGTCTC
CTCA (SEQ ID NO: 386)

[0821] HCVR (V_{H}) Amino Acid Sequence

QVQLVQSGAEVKKPGSSVRVSCKASRGTFSSYAISWVRQAPGQGLEWMGG
IIPIFGTANYAQKFLARVTITADESTSTAYMELSSLRSEDTAVYYCAREK
GWNYFDYWGQGTLVTVSS (SEQ ID NO: 387)

HCDR1:RGTFSSYA (SEQ ID NO: 388)

HCDR2:IIPIFGTA (SEQ ID NO: 389)

HCDR3:AREKGWNYFDY (SEQ ID NO: 390)

[0822] LCVR (V_{L}) Nucleotide Sequence

GACATCCAGATGACCCAGTCTCCACCTTCCGTGTCTGCATCTGTAGGAGA
CAGAGTCACCATCACTTGTCGGGCGAGTCAGGGTATTAGCAGCTGGTTAG
CCTGGTATCAGCAGAAACCAGGGAAAGCCCCTAAACTCCTGATCTATGCT
GCATCCAGTTTGCAAAGTGGGGTCCCATCAAGGTTCAGCGGCAGTGGATC
TGGGACAGATTTCACTCTCACCATCAGCAGCCTGCAGCCTGAAGATTTTG
CAACTTACTATTGTCAACAGGCTAACAGTTTCCCTCGGACGTTCGGCCAA
GGGACCAAGGTGGAAATCAAA (SEQ ID NO: 391)

[0823] LCVR (V_{L}) Amino Acid Sequence

DIQMTQSPPSVSASVGDRVTITCRASQGISSWLAWYQQKPGKAPKLLIYA
ASSLQSGVPSRFSGSGSGTDFTLTISSLQPEDFATYYCQQANSFPRTFGQ
GTKVEIK (SEQ ID NO: 392)

LCDR1: QGISSW (SEQ ID NO: 393)

LCDR2: AAS (SEQ ID NO: 394)

LCDR3: QQANSFPRT (SEQ ID NO: 395)

### 12816B

[0824] HCVR (V_{H}) Nucleotide Sequence

CAGGTGCAGCTGGTGGAGTCTGGGGGAGGCTTGGTCAAGCCTGGAGGGTC
CCTGAGACTCTCCTGTGCAGCCTCTGGATTCACCTTCAGTGACTACTACA
TGAACTGGATCCGCCAGGCTCCAGGGAAGGGGCTGGAGTGGGTTTCATAC
ATTAGTAGTAGTGGGACTACCATATACTACGCAGACTCTGTGAAGGGCCG
ATTCACCATCTCCAGGGACAACGCCAAGAAATCACTGTATCTGGAGATGA
ACAGCCTCAGAGCCGAGGACACGGCCGTGTACTACTGTGCGAGAGAGGGG
TACGGTAATGACTACTATTACTACGGTATAGACGTCTGGGGCCAAGGGAC
CACGGTCACCGTCTCCTCA (SEQ ID NO: 396)

[0825] HCVR (V_{H}) Amino Acid Sequence

QVQLVESGGGLVKPGGSLRLSCAASGFTFSDYYMNWIRQAPGKGLEWVSY
ISSSGTTIYYADSVKGRFTISRDNAKKSLYLEMNSLRAEDTAVYYCAREG
YGNDYYYYGIDVWGQGTTVTVSS (SEQ ID NO: 397)

HCDR1:GFTFSDYY (SEQ ID NO: 398)

HCDR2:ISSSGTTI (SEQ ID NO: 399)

HCDR3:AREGYGNDYYYYGIDV (SEQ ID NO: 400)

[0826] LCVR (V_{L}) Nucleotide Sequence

GATATTGTGATGACTCAGTCTCCACTCTCCCTGCCCGTCACCCCTGGAGA
GCCGGCCTCCATCTCCTGCAGGTCTAGTCAGAGCCTCCTGCATGGTAATG
GATACAACTATTTGACTTGGTACCTGCAGAAGCCAGGGCAGTCTCCACAG
CTCCTGATCTATTTGGGTTCTAATCGGGCCTCCGGGGTCCCTGACAGGTT
CAGTGGCAGTGGATCAGGCACAGATTTTACACTGAAAATAAGCAGAGTGG
AGGCTGAGGATGTTGGGGTTTATTACTGCATGCAAGCTCTACAAACTCCG
TACACTTTTGGCCAGGGGACCAAGCTGGAGATCAAA (SEQ IDNO: 40
1)

[0827] LCVR (V_{L}) Amino Acid Sequence

DIVMTQSPLSLPVTPGEPASISCRSSQSLLHGNGYNYLTWYLQKPGQSPQ
LLIYLGSNRASGVPDRFSGSGSGTDFTLKISRVEAEDVGVYYCMQALQTP
YTFGQGTKLEIK (SEQ ID NO: 402)

LCDR1: QSLLHGNGYNY (SEQ ID NO: 403)

LCDR2: LGS (SEQ ID NO: 404)

LCDR3: MQALQTPYT (SEQ ID NO: 405)

### 12833B

[0828] HCVR (V_{H}) Nucleotide Sequence

CAGGTGCAGCTGGTGGAGTCTGGGGGAGGCGTGGTCCAGCCTGGGAGGTC
CCTGAGACTCTCCTGTGCAGCCTCTGGATTCACCTTCAGTAGCTTTGGCA
TGCACTGGGTCCGCCAGGCTCCAGGCAAGGGGCTGGAGTGGGTGATATTT
ATATCATATGATGGAAGTGATAAATACTATGCAGACTCCGTGAAGGGCCG
ATTCGCCATCTCCAGAGACAGTTCCAAGAACACGCTATATCTGCAAATGA
ACAGCCTGAGAGCTGAGGACACGGCTGTGTATTACTGTGCGAAAGAAAAC
GGTATTTTGACTGATTCCTACGGTATGGACGTCTGGGGCCAAGGGACCAC
GGTCACCGTCTCCTCA (SEQ ID NO: 406)

[0829] HCVR (V_{H}) Amino Acid Sequence

QVQLVESGGGVVQPGRSLRLSCAASGFTFSSFGMHWVRQAPGKGLEWVIF
ISYDGSDKYYADSVKGRFAISRDSSKNTLYLQMNSLRAEDTAVYYCAKEN
GILTDSYGMDVWGQGTTVTVSS (SEQ ID NO: 407)

HCDR1:GFTFSSFG (SEQ ID NO: 408)

HCDR2:ISYDGSDK (SEQ ID NO: 409)

HCDR3:AKENGILTDSYGMDV (SEQ ID NO: 410)

[0830] LCVR (V_{L}) Nucleotide Sequence

GACATCCAGATGACCCAGTCTCCATCCTCCCTGTCTGCATCTGTAGGAGA
CAGAGTCACCATCACTTGCCGGGCAAGTCAGAGCATTAGCAGCTATTTAA
ATTGGTATCAGCAGAAACCAGGGAAAGCCCCTAAGCTCCTGATCTATGCT
GCATCCAGTTTGCAAAGTGGGGTCCCGTCAAGGTTCAGTGGCAGTGGATC
TGGGACAGATTTCACTCTCACCATCAGCAGTCTGCAACCTGAAGATTTTG
CAACTTACTACTGTCAACAGAGTTACAGTACCCCTCCGATCACCTTCGGC
CAAGGGACACGACTGGAGATTAAA (SEQ ID NO: 411)

[0831] LCVR (V_{L}) Amino Acid Sequence

DIQMTQSPSSLSASVGDRVTITCRASQSISSYLNWYQQKPGKAPKLLIYA
ASSLQSGVPSRFSGSGSGTDFTLTISSLQPEDFATYYCQQSYSTPPITFG
QGTRLEIK (SEQ ID NO: 412)

LCDR1: QSISSY (SEQ ID NO: 413)

LCDR2: AAS (SEQ ID NO: 414)

LCDR3: QQSYSTPPIT (SEQ ID NO: 415)

### 12834B

[0832] HCVR (V_{H}) Nucleotide Sequence

CAGGTTCAGCTGGTGCAGTCTGGAGCTGAGGTGAAGAAGCCTGGGGCCTC
TGTGAAGGTCTCCTGCAAGGCTTCTGGTTACACCTTTACCAGCTATGGTA
TCAGCTGGGTGCGACAGGCCCCTGGACAAGGGCTTGAGTGGATGGGATGG
ATCAGTGTTTACCATGGTAACACAAACTATGCACAGAAGTTCCAGGGCAG
AGTCACCATGACCACAGACACATCCACGAGCACAGCCTACATGGAGCTGA
GGAGCCTGAGATCTGACGACACGGCCGTGTATTACTGTGCGAGAGAGGGG
TATTACGATTTTTGGAGTGGTTATTACCCTTTTGACTACTGGGGCCAGGG
AACCCTGGTCACCGTCTCCTCA (SEQ ID NO: 416)

[0833] HCVR (V_{H}) Amino Acid Sequence

QVQLVQSGAEVKKPGASVKVSCKASGYTFTSYGISWVRQAPGQGLEWMGW
ISVYHGNTNYAQKFQGRVTMTTDTSTSTAYMELRSLRSDDTAVYYCAREG
YYDFWSGYYPFDYWGQGTLVTVSS (SEQ ID NO: 417)

HCDR1:GYTFTSYG (SEQ ID NO: 418)

HCDR2:ISVYHGNT (SEQ ID NO: 419)

HCDR3:AREGYYDFWSGYYPFDY (SEQ ID NO: 420)

[0834] LCVR (V_{L}) Nucleotide Sequence

GACATCCAGATGACCCAGTCTCCATCCTCCCTGTCTGCATCTGTAGGAGA
CAGAGTCACCATCACTTGCCGGGCAAGTCAGAGCATTAGCAGCTATTTAA
ATTGGTATCAGCAGAAACCAGGGAAAGCCCCTAAGCTCCTGATCTATGCT
GCATCCAGTTTGCAAAGTGGGGTCCCGTCAAGGTTCAGTGGCAGTGGATC
TGGGACAGATTTCACTCTCACCATCAGCAGTCTGCAACCTGAAGATTTTG
CAACTTACTACTGTCAACAGAGTTACAGTACCCCTCCGATCACCTTCGGC
CAAGGGACACGACTGGAGATTAAA (SEQ ID NO: 421)

[0835] LCVR (V_{L}) Amino Acid Sequence

DIQMTQSPSSLSASVGDRVTITCRASQSISSYLNWYQQKPGKAPKLLIYA
ASSLQSGVPSRFSGSGSGTDFTLTISSLQPEDFATYYCQQSYSTPPITFG
QGTRLEIK (SEQ ID NO: 422)

LCDR1: QSISSY (SEQ ID NO: 423)

LCDR2: AAS (SEQ ID NO: 424)

LCDR3: QQSYSTPPIT (SEQ ID NO: 425)

### 12835B

[0836] HCVR (V_{H}) Nucleotide Sequence

GAGGTGCAGCTGGTGGAGTCTGGGGGAGGCTTGATACAACCTGGAGGGTC
CCTGAGACTCTCCTGTGAAGCCTCTGGATTCACCTTCAGAAATTATGAAA
TGAATTGGGTCCGCCAGGCTCCAGGGAAGGGGCTGGAGTGGGTTTCATAT
ATTAGTAGTAGTGGTAATATGAAAGACTACGCAGAGTCTGTGAAGGGCCG
ATTCACCATCTCCAGAGACAATGTCAAGAATTCACTGCAGCTGCAAATGA
ACAGCCTGAGAGTCGAGGACACGGCTGTTTATTACTGTGCGAGAGACGAG
TTTCCTTACGGAATGGACGTCTGGGGCCAAGGGACCACGGTCACCGTCTC
CTCA (SEQ ID NO: 426)

[0837] HCVR (V_{H}) Amino Acid Sequence

EVQLVESGGGLIQPGGSLRLSCEASGFTFRNYEMNWVRQAPGKGLEWVSY
ISSSGNMKDYAESVKGRFTISRDNVKNSLQLQMNSLRVEDTAVYYCARDE
FPYGMDVWGQGTTVTVSS (SEQ ID NO: 427)

HCDR1:GFTFRNYE (SEQ ID NO: 428)

HCDR2:ISSSGNMK (SEQ ID NO: 429)

HCDR3:ARDEFPYGMDV (SEQ ID NO: 430)

[0838] LCVR (V_{L}) Nucleotide Sequence

GACATCCAGATGACCCAGTCTCCATCCTCCCTGTCTGCATCTGTAGGAGA
CAGAGTCACCATCACTTGCCGGGCAAGTCAGAGCATTAGCAGCTATTTAA
ATTGGTATCAGCAGAAACCAGGGAAAGCCCCTAAGCTCCTGATCTATGCT
GCATCCAGTTTGCAAAGTGGGGTCCCGTCAAGGTTCAGTGGCAGTGGATC
TGGGACAGATTTCACTCTCACCATCAGCAGTCTGCAACCTGAAGATTTTG
CAACTTACTACTGTCAACAGAGTTACAGTACCCCTCCGATCACCTTCGGC
CAAGGGACACGACTGGAGATTAAA (SEQ ID NO: 431)

[0839] LCVR (V_{L}) Amino Acid Sequence

DIQMTQSPSSLSASVGDRVTITCRASQSISSYLNWYQQKPGKAPKLLIYA
ASSLQSGVPSRFSGSGSGTDFTLTISSLQPEDFATYYCQQSYSTPPITFG
QGTRLEIK (SEQ ID NO: 432)

LCDR1: QSISSY (SEQ ID NO: 433)

LCDR2: AAS (SEQ ID NO: 434)

LCDR3: QQSYSTPPIT (SEQ ID NO: 435)

### 12847B (REGN17083 Anti-hTfR Fab; REGN17077 Anti-hTfR scFv; REGN16826 Anti-hTfR scFv:hGAA)

[0840] HCVR (V_{H}) Nucleotide Sequence

GAAGTGCAGCTGGTGGAGTCTGGGGGAGGCTTGGTTCAGCCTGGCAGGTC
CCTGAGACTCTCCTGTGCAGCCTCTGGATTCACCTTTGATGATTATGCCA
TGAACTGGGTCCGGCAAGCTCCAGGGAAGGGCCTGGAGTGGGTCTCAGGT
ATTAGTTGGAGTAGTGGTAGCATGGACTATGCGGACTCTGTGAAGGGCCG
ATTCACCATCTCCAGAGACAACGCCAAAAACTCCCTGTATCTGCAAATGA
ACAGTCTGAGAACTGAGGACACGGCCTTATATTACTGTGCAAAAGCTAGG
GAAGTTGGAGACTACTACGGTATGGACGTCTGGGGCCAAGGGACCACGGT
CACCGTCTCCTCA (SEQ ID NO: 436)

[0841] HCVR (V_{H}) Amino Acid Sequence

EVQLVESGGGLVQPGRSLRLSCAASGFTFDDYAMNWVRQAPGKGLEWVSG
ISWSSGSMDYADSVKGRFTISRDNAKNSLYLQMNSLRTEDTALYYCAKAR
EVGDYYGMDVWGQGTTVTVSS (SEQ ID NO: 437)

HCDR1:GFTFDDYA (SEQ ID NO: 438)

HCDR2:ISWSSGSM (SEQ ID NO: 439)

HCDR3:AKAREVGDYYGMDV (SEQ ID NO: 440)

[0842] LCVR (V_{L}) Nucleotide Sequence

GACATCCAGATGACCCAGTCTCCATCCTCCCTGTCTGCATCTGTAGGAGA
CAGAGTCACCATCACTTGCCGGGCAAGTCAGAGCATTAGCAGCTATTTAA
ATTGGTATCAGCAGAAACCAGGGAAAGCCCCTAAGCTCCTGATCTATGCT
GCATCCAGTTTGCAAAGTGGGGTCCCGTCAAGGTTCAGTGGCAGTGGATC
TGGGACAGATTTCACTCTCACCATCAGCAGTCTGCAACCTGAAGATTTTG
CAACTTACTACTGTCAACAGAGTTACAGTACCCCTCCGATCACCTTCGGC
CAAGGGACACGACTGGAGATTAAA (SEQ ID NO: 441)

[0843] LCVR (V_{L}) Amino Acid Sequence

DIQMTQSPSSLSASVGDRVTITCRASQSISSYLNWYQQKPGKAPKLLIYA
ASSLQSGVPSRFSGSGSGTDFTLTISSLQPEDFATYYCQQSYSTPPITFG
QGTRLEIK (SEQ ID NO: 442)

LCDR1: QSISSY (SEQ ID NO: 443)

LCDR2: AAS (SEQ ID NO: 444)

LCDR3: QQSYSTPPIT (SEQ ID NO: 445)

### 12848B (REGN16827 Anti-hTfR scFv:hGAA)

[0844] HCVR (V_{H}) Nucleotide Sequence

GAAGTGCAGCTGGTGGAGTCTGGGGGAGGCTTGGTACAGCCTGGCAGGTC
CCTGACACTCTCCTGTGCAGCCTCTGGATTCACCTTTGATAATTTTGGCA
TGCACTGGGTCCGGCAAGGTCCAGGGAAGGGCCTGGAATGGGTCTCAGGT
CTTACTTGGAATAGTGGTGTCATAGGCTATGCGGACTCTGTGAAGGGCCG
ATTCACCATCTCCAGAGACAACGCCAAGAACTCCCTGTATCTGCAAATGA
ACAGTCTGAGACCTGAGGACACGGCCTTATATTACTGTGCAAAAGATATA
CGGAATTACGGCCCCTTTGACTACTGGGGCCAGGGAACCCTGGTCACCGT
CTCCTCA (SEQ ID NO: 446)

[0845] HCVR (V_{H}) Amino Acid Sequence

EVQLVESGGGLVQPGRSLTLSCAASGFTFDNFGMHWVRQGPGKGLEWVSG
LTWNSGVIGYADSVKGRFTISRDNAKNSLYLQMNSLRPEDTALYYCAKDI
RNYGPFDYWGQGTLVTVSS (SEQ ID NO: 447)

HCDR1:GFTFDNFG (SEQ ID NO: 448)

HCDR2:LTWNSGVI (SEQ ID NO: 449)

HCDR3:AKDIRNYGPFDY (SEQ ID NO: 450)

[0846] LCVR (V_{L}) Nucleotide Sequence

GAAATTGTGTTGACGCAGTCTCCAGGCACCCTGTCTTTGTCTCCAGGGGA
AAGAGCCACCCTCTCCTGCAGGGCCAGTCAGAGTGTTAGCAGCAGCTACT
TAGCCTGGTACCAGCAGAAACCTGGCCAGGCTCCCAGGCTCCTCATCTAT
GGTGCATCCAGCAGGGCCACTGGCATCCCAGACAGGTTCAGTGGCAGTGG
GTCTGGGACAGACTTCACTCTCACCATCAGCAGACTGGAGCCTGAAGATT
TTGCAGTGTATTACTGTCAGCAGTATGGTAGCTCACCTTGGACGTTCGGC
CAAGGGACCAAGGTGGAAATCAAA (SEQ ID NO: 451)

[0847] LCVR (V_{L}) Amino Acid Sequence

EIVLTQSPGTLSLSPGERATLSCRASQSVSSSYLAWYQQKPGQAPRLLIY
GASSRATGIPDRFSGSGSGTDFTLTISRLEPEDFAVYYCQQYGSSPWTFG
QGTKVEIK (SEQ ID NO: 452)

LCDR1: QSVSSSY (SEQ ID NO: 453)

LCDR2: GAS (SEQ ID NO: 454)

LCDR3: QQYGSSPWT (SEQ ID NO: 455)

### 12843B (REGN17075 Anti-hTfR scFv; REGN16824 aAnti-hTfR scFv:hGAA; REGN17081 Anti-hTfR Fab)

[0848] HCVR (V_{H}) Nucleotide Sequence

GAGGTGCAGCTGGTGGAGTCTGGGGGAGGCTTAGTACAGCCTGGAGGGTC
CCTAAGACTCTCCTGTGCAGCCTCTGGATTCACCTTCAATATTTTTGAAA
TGAACTGGGTCCGCCAGGCTCCAGGGAAGGGGCTGGAGTGGATTTCCTAC
ATTAGTAGTCGTGGAACTACCACATACTACGCAGACTCTGTGAGGGGCCG
ATTCACCATCTCCAGAGACAACGCCAAGAACTCACTGTATCTGCAAATGA
ACAGCCTGAGAGCCGAGGACACGGCTGTTTATTACTGTGCGAGAGATTAT
GAAGCAACAATCCCTTTTGACTTCTGGGGCCAGGGAACCCTGGTCACCGT
CTCCTCA (SEQ ID NO: 456)

[0849] HCVR (V_{H}) Amino Acid Sequence

EVQLVESGGGLVQPGGSLRLSCAASGFTFNIFEMNWVRQAPGKGLEWISY
ISSRGTTTYYADSVRGRFTISRDNAKNSLYLQMNSLRAEDTAVYYCARDY
EATIPFDFWGQGTLVTVSS (SEQ ID NO: 457)

HCDR1:GFTFNIFE (SEQ ID NO: 458)

HCDR2:ISSRGTTT (SEQ ID NO: 459)

HCDR3:ARDYEATIPFDF (SEQ ID NO: 460)

[0850] LCVR (V_{L}) Nucleotide Sequence

GACATCCAGATGACCCAGTCTCCATCCTCCCTGTCTGCATCTGTAGGAGA
CAGAGTCACCATCACTTGCCGGGCAAGTCAGAGCATTAGCAGCTATTTAA
ATTGGTATCAGCAGAAACCAGGGAAAGCCCCTAAGCTCCTGATCTATGCT
GCATCCAGTTTGCAAAGTGGGGTCCCGTCAAGGTTCAGTGGCAGTGGATC
TGGGACAGATTTCACTCTCACCATCAGCAGTCTGCAACCTGAAGATTTTG
CAACTTACTACTGTCAACAGAGTTACAGTACCCCTCCGATCACCTTCGGC
CAAGGGACACGACTGGAGATTAAA (SEQ ID NO: 461)

[0851] LCVR (V_{L}) Amino Acid Sequence

DIQMTQSPSSLSASVGDRVTITCRASQSISSYLNWYQQKPGKAPKLLIYA
ASSLQSGVPSRFSGSGSGTDFTLTISSLQPEDFATYYCQQSYSTPPITFG
QGTRLEIK (SEQ ID NO: 462)

LCDR1: QSISSY (SEQ ID NO: 463)

LCDR2: AAS (SEQ ID NO: 464)

LCDR3: QQSYSTPPIT (SEQ ID NO: 465)

### 12844B

[0852] HCVR (V_{H}) Nucleotide Sequence

GAGGTGCAGCTGGTGGAGTCTGGGGGAAGTGTGGTACGGCCTGGGGGGTC
CCTGAGACTCTCCTGTGAAGCCTCTGGATTCACCTTTGATGATTATGGCA
TGAGCTGGGTCCGCCAAGATCCAGGGAAGGGGCTGGAGTGGGTCTCTGGT
ATTAATTGGAATGGTGATAGAACAAATTATGCAGACTCTGTGAAGGGCCG
ATTCATCATTTCCAGAGACAACGCCAAGAACTCTGTGTATCTACAAATGA
ACAGTCTGAGAGCGGAGGACTCGGCCTTGTATCACTGTGCGAGAGATCAG
GGACTCGGAGTGGCAGCTACCCTTGACTACTGGGGCCAGGGAACCCTGGT
CACCGTCTCCTCA (SEQ ID NO: 466)

[0853] HCVR (V_{H}) Amino Acid Sequence

EVQLVESGGSVVRPGGSLRLSCEASGFTFDDYGMSWVRQDPGKGLEWVSG
INWNGDRTNYADSVKGRFIISRDNAKNSVYLQMNSLRAEDSALYHCARDQ
GLGVAATLDYWGQGTLVTVSS (SEQ ID NO: 467)

HCDR1:GFTFDDYG (SEQ ID NO: 468)

HCDR2:INWNGDRT (SEQ ID NO: 469)

HCDR3:ARDQGLGVAATLDY (SEQ ID NO: 470)

[0854] LCVR (V_{L}) Nucleotide Sequence

GACATCCAGATGACCCAGTCTCCATCCTCCCTGTCTGCATCTGTAGGAGA
CAGAGTCACCATCACTTGCCGGGCAAGTCAGAGCATTAGCAGCTATTTAA
ATTGGTATCAGCAGAAACCAGGGAAAGCCCCTAAGCTCCTGATCTATGCT
GCATCCAGTTTGCAAAGTGGGGTCCCGTCAAGGTTCAGTGGCAGTGGATC
TGGGACAGATTTCACTCTCACCATCAGCAGTCTGCAACCTGAAGATTTTG
CAACTTACTACTGTCAACAGAGTTACAGTACCCCTCCGATCACCTTCGGC
CAAGGGACACGACTGGAGATTAAA (SEQ ID NO: 471)

[0855] LCVR (V_{L}) Amino Acid Sequence

DIQMTQSPSSLSASVGDRVTITCRASQSISSYLNWYQQKPGKAPKLLIYA
ASSLQSGVPSRFSGSGSGTDFTLTISSLQPEDFATYYCQQSYSTPPITFG
QGTRLEIK (SEQ ID NO: 472)

LCDR1: QSISSY (SEQ ID NO: 473)

LCDR2: AAS (SEQ ID NO: 474)

LCDR3: QQSYSTPPIT (SEQ ID NO: 475)

### 12845B (REGN17082 Fab; REGN17076 scFv; REGN16825 Anti-hTfR scFv:hGAA)

[0856] HCVR (V_{H}) Nucleotide Sequence

GAGGTGCAGCTGGTGGAGTCTGGGGGAGGCTTGGTACAGCCTGGAGGGTC
CCTGAGACTCTCCTGTGCAGCCTCTGGATTCACCGTCAGTAATTATGAAA
TGAACTGGGTCCGCCAGGCTCCAGGGAAGGGGCTGGAGTGGGTTTCATAC
ATTAGTAGTAGTACCAGTAACATATACTACGCAGACTCTGTGAAGGGCCG
ATTCACCATCTCCAGAGACAACGCCGAGAACTCACTGTATCTGCAGATGA
ACAGCCTGAGAGTCGAGGACACGGCTGTTTATTACTGTGTGAGAGATGGG
ATTGTAGTAGTTCCAGTTGGTCGTGGATACTACTATTACGGTTTGGACGT
CTGGGGCCAAGGGACCACGGTCACCGTCTCCTCA (SEQ ID NO: 476
)

[0857] HCVR (V_{H}) Amino Acid Sequence

EVQLVESGGGLVQPGGSLRLSCAASGFTVSNYEMNWVRQAPGKGLEWVSY
ISSSTSNIYYADSVKGRFTISRDNAENSLYLQMNSLRVEDTAVYYCVRDG
IVVVPVGRGYYYYGLDVWGQGTTVTVSS (SEQ ID NO: 477)

HCDR1:GFTVSNYE (SEQ ID NO: 478)

HCDR2:ISSSTSNI (SEQ ID NO: 479)

HCDR3: VRDGIVVVPVGRGYYYYGLDV (SEQ ID NO: 480)

[0858] LCVR (V_{L}) Nucleotide Sequence

GACATCCAGATGACCCAGTCTCCATCCTCCCTGTCTGCATCTGTAGGAGA
CAGAGTCACCATCACTTGCCGGGCAAGTCAGAGCATTAGCAGCTATTTAA
ATTGGTATCAGCAGAAACCAGGGAAAGCCCCTAAGCTCCTGATCTATGCT
GCATCCAGTTTGCAAAGTGGGGTCCCGTCAAGGTTCAGTGGCAGTGGATC
TGGGACAGATTTCACTCTCACCATCAGCAGTCTGCAACCTGAAGATTTTG
CAACTTACTACTGTCAACAGAGTTACAGTACCCCTCCGATCACCTTCGGC
CAAGGGACACGACTGGAGATTAAA (SEQ ID NO: 481)

[0859] LCVR (V_{L}) Amino Acid Sequence

DIQMTQSPSSLSASVGDRVTITCRASQSISSYLNWYQQKPGKAPKLLIYA
ASSLQSGVPSRFSGSGSGTDFTLTISSLQPEDFATYYCQQSYSTPPITFG
QGTRLEIK (SEQ ID NO: 482)

LCDR1: QSISSY (SEQ ID NO: 483)

LCDR2: AAS (SEQ ID NO: 484)

LCDR3: QQSYSTPPIT (SEQ ID NO: 485)

### 12839B (REGN17080 Fab; REGN17074 scFv; REGN16822 Anti-hTfR scFv:hGAA)

[0860] HCVR (V_{H}) Nucleotide Sequence

CAGGTGCAGCTGGTGGAGTCTGGGGGAGGCGTGGTCCAGCCTGGAAGGTC
CCTGAGACTCTCCTGCGCAGCCTCTGGATTCCCCTTTAGTAATTATGTCA
TGTATTGGGTCCGCCAGGCTCCAGGCAAGGGGCTGGAGTGGGTGGCTCTT
ATTTTTTTTGACGGAAAGAAAAACTATCATGCAGACTCCGTGAAGGGCCG
ATTCACCATAACCAGAGACAATTCCAAAAATATGTTATATCTGCAAATGA
ACAGCCTGAGACCTGAGGACGCGGCTGTGTATTACTGTGCGAAAATCCAT
TGTCCTAATGGTGTATGTTACAAGGGGTATTACGGAATGGACGTCTGGGG
CCAAGGGACCACGGTCACCGTCTCCTCA (SEQ ID NO: 486)

[0861] HCVR (V_{H}) Amino Acid Sequence

QVQLVESGGGVVQPGRSLRLSCAASGFPFSNYVMYWVRQAPGKGLEWVAL
IFFDGKKNYHADSVKGRFTITRDNSKNMLYLQMNSLRPEDAAVYYCAKIH
CPNGVCYKGYYGMDVWGQGTTVTVSS (SEQ ID NO: 487)

HCDR1:GFPFSNYV (SEQ ID NO: 488)

HCDR2:IFFDGKKN (SEQ ID NO: 489)

HCDR3:AKIHCPNGVCYKGYYGMDV (SEQ ID NO: 490)

[0862] LCVR (V_{L}) Nucleotide Sequence

GACATCCAGATGACCCAGTCTCCATCCTCCCTGTCTGCATCTGTAGGAGA
CAGAGTCACCATCACTTGCCGGGCAAGTCAGAGCATTAGCAGCTATTTAA
ATTGGTATCAGCAGAAACCAGGGAAAGCCCCTAAGCTCCTGATCTATGCT
GCATCCAGTTTGCAAAGTGGGGTCCCGTCAAGGTTCAGTGGCAGTGGATC
TGGGACAGATTTCACTCTCACCATCAGCAGTCTGCAACCTGAAGATTTTG
CAACTTACTACTGTCAACAGAGTTACAGTACCCCTCCGATCACCTTCGGC
CAAGGGACACGACTGGAGATTAAA (SEQ ID NO: 491)

[0863] LCVR (V_{L}) Amino Acid Sequence

DIQMTQSPSSLSASVGDRVTITCRASQSISSYLNWYQQKPGKAPKLLIYA
ASSLQSGVPSRFSGSGSGTDFTLTISSLQPEDFATYYCQQSYSTPPITFG
QGTRLEIK (SEQ ID NO: 492)

LCDR1: QSISSY (SEQ ID NO: 493)

LCDR2: AAS (SEQ ID NO: 494)

LCDR3: QQSYSTPPIT (SEQ ID NO: 495)

### 12841B (REGN16823 Anti-hTfR scFv:hGAA)

[0864] HCVR (V_{H}) Nucleotide Sequence

GAGGTGCAGCTGGTGGAGTCTGGGGGAGGCTTGGTCCAGCCTGGGGGGTC
CCTAAGACTCTCCTGTGCAGCCTCTGGATTCACCTTTAGTAACTATTGGA
TGAACTGGGTCCGCCAGGCTCCAGGGAAGGGACTGGAGTGGGTGGCCAAT
ATAAAAGAAGATGGAGGTAAGAAATTGTATGTGGACTCTGTGAAGGGCCG
ATTCACCATCTCCAGAGACAACGCCAAGAACTCACTGTTTCTGCAAATGA
ACAGCCTGAGAGCCGAGGACACGGCTGTGTATTATTGTGCGAGAGAAGAT
ACAACTTTGGTTGTGGACTACTACTACTACGGTATGGACGTCTGGGGCCA
AGGGACCACGGTCACCGTCTCCTCA (SEQ ID NO: 496)

[0865] HCVR (V_{H}) Amino Acid Sequence

EVQLVESGGGLVQPGGSLRLSCAASGFTFSNYWMNWVRQAPGKGLEWVAN
IKEDGGKKLYVDSVKGRFTISRDNAKNSLFLQMNSLRAEDTAVYYCARED
TTLVVDYYYYGMDVWGQGTTVTVSS (SEQ ID NO: 497)

HCDR1:GFTFSNYW (SEQ ID NO: 498)

HCDR2:IKEDGGKK (SEQ ID NO: 499)

HCDR3:AREDTTLVVDYYYYGMDV (SEQ ID NO: 500)

[0866] LCVR (V_{L}) Nucleotide Sequence

GACATCCAGATGACCCAGTCTCCATCCTCCCTGTCTGCATCTGTAGGAGA
CAGAGTCACCATCACTTGCCGGGCAAGTCAGAGCATTAGCAGCTATTTAA
ATTGGTATCAGCAGAAACCAGGGAAAGCCCCTAAGCTCCTGATCTATGCT
GCATCCAGTTTGCAAAGTGGGGTCCCGTCAAGGTTCAGTGGCAGTGGATC
TGGGACAGATTTCACTCTCACCATCAGCAGTCTGCAACCTGAAGATTTTG
CAACTTACTACTGTCAACAGAGTTACAGTACCCCTCCGATCACCTTCGGC
CAAGGGACACGACTGGAGATTAAA (SEQ ID NO: 501)

[0867] LCVR (V_{L}) Amino Acid Sequence

DIQMTQSPSSLSASVGDRVTITCRASQSISSYLNWYQQKPGKAPKLLIYA
ASSLQSGVPSRFSGSGSGTDFTLTISSLQPEDFATYYCQQSYSTPPITFG
QGTRLEIK (SEQ ID NO: 502)

LCDR1: QSISSY (SEQ ID NO: 503)

LCDR2: AAS (SEQ ID NO: 504)

LCDR3: QQSYSTPPIT (SEQ ID NO: 505)

### 12850B (REGN16828 Anti-hTfR scFv:hGAA)

[0868] HCVR (V_{H}) Nucleotide Sequence

CAGGTCCAGCTGGTGCAGTCTGGGGCTGAGGTGAAGAAGCCTGGGTCCTC
GGTGAAGGTCTCCTGCAAGGCTTCTGGAGGCACCTTCAACACCTATGCTA
TCACCTGGGTGCGACAGGCCCCTGGACAAGGGCTTGAATGGATGGGGGGA
ATCATCCCTATCTCTGGCATAGCAGAGTACGCACAGAAGTTCCAGGGCAG
AGTCACGATCACCACGGATGACTCCTCGACCACAGCCTACATGGAACTGA
ACAGTCTGAGATCTGAGGACACGGCCGTGTATTACTGTGCGAGCTGGAAC
TACGCACTCTACTACTTCTACGGTATGGACGTCTGGGGCCGAGGGACCAC
GGTCACCGTCTCCTCA (SEQ ID NO: 506)

[0869] HCVR (V_{H}) Amino Acid Sequence

QVQLVQSGAEVKKPGSSVKVSCKASGGTFNTYAITWVRQAPGQGLEWMGG
IIPISGIAEYAQKFQGRVTITTDDSSTTAYMELNSLRSEDTAVYYCASWN
YALYYFYGMDVWGRGTTVTVSS (SEQ ID NO: 507)

HCDR1:GGTFNTYA (SEQ ID NO: 508)

HCDR2:IIPISGIA (SEQ ID NO: 509)

HCDR3:ASWNYALYYFYGMDV (SEQ ID NO: 510)

[0870] LCVR (V_{L}) Nucleotide Sequence

GAAATTGTGTTGACGCAGTCTCCAGGCACCCTGTCTTTGTCTCCAGGGGA
AAGAGCCACCCTCTCCTGCAGGGCCAGTCAGAGTGTTAGCAGCAGCTACT
TAGCCTGGTACCAGCAGAAACCTGGCCAGGCTCCCAGGCTCCTCATCTAT
GGTGCATCCAGCAGGGCCACTGGCATCCCAGACAGGTTCAGTGGCAGTGG
GTCTGGGACAGACTTCACTCTCACCATCAGCAGACTGGAGCCTGAAGATT
TTGCAGTGTATTACTGTCAGCAGTATGGTAGCTCACCTTGGACGTTCGGC
CAAGGGACCAAGGTGGAAATCAAA (SEQ ID NO: 511)

[0871] LCVR (V_{L}) Amino Acid Sequence

EIVLTQSPGTLSLSPGERATLSCRASQSVSSSYLAWYQQKPGQAPRLLIY
GASSRATGIPDRFSGSGSGTDFTLTISRLEPEDFAVYYCQQYGSSPWTFG
QGTKVEIK (SEQ ID NO: 512)

LCDR1: QSVSSSY (SEQ ID NO: 513)

LCDR2: GAS (SEQ ID NO: 514)

LCDR3: QQYGSSPWT (SEQ ID NO: 515)

### 69261

[0872] HCVR (V_{H}) Nucleotide Sequence

CAGGTGCAGCTGGTGGAGTCTGGGGGAGGCTTGGTCAAGCCTGGAGGGTC
CCTGAGACTCTCCTGTGCAGCCTCTGGATTCACCTTCAGTGTCTATTACA
TGAACTGGATCCGCCAGGCTCCAGGGAAGGGCCTGGAGTGGGTTTCATAC
ATTAGTAGTAGTGGTAGTACCATATACTACGCAGACTCTGTGAAGGGCCG
ATTCACCATCTCCAGGGACAACGCCAAGAACTCACTGTATCTCCAAATGA
ACAGTCTGAGAGCCGAGGACACGGCCGTATATTACTGTGGGAGAGAAGGG
TATAGTGGGACTTATTCTTATTACGGTATGGACGTCTGGGGCCAAGGGAC
CACGGTCACCGTCTCCTCA (SEQ ID NO: 516)

[0873] HCVR (V_{H}) Amino Acid Sequence

QVQLVESGGGLVKPGGSLRLSCAASGFTFSVYYMNWIRQAPGKGLEWVSY
ISSSGSTIYYADSVKGRFTISRDNAKNSLYLQMNSLRAEDTAVYYCGREG
YSGTYSYYGMDVWGQGTTVTVSS (SEQ ID NO: 517)

HCDR1:GFTFSVYY (SEQ ID NO: 518)

HCDR2:ISSSGSTI (SEQ ID NO: 519)

HCDR3:GREGYSGTYSYYGMDV (SEQ ID NO: 520)

[0874] LCVR (V_{L}) Nucleotide Sequence

GATATTGTGATGACTCAGTCTCCACTCTCCCTGCCCGTCACCCCTGGAGA
GCCGGCCTCCATCTCCTGCAGGTCTAGTCAGAGCCTCCTGCATAGTAATG
GATACAACTATTTGGATTGGTACCTGCAGAAGCCAGGGCAGTCTCCACAG
TTCCTGATCTATTTGGGTTCTAATCGGGCCTCCGGGGTCCCTGACAGGTT
CAGTGGCAGTGGATCAGGCACAGATTTTACACTGAAAATCAACAGAGTGG
AGGCTGAGGATGTTGGGGTTTATTACTGCATGCAAGCTCTACAAACTCCG
TACACTTTTGGCCAGGGGACCAAGCTGGAGATCAAA (SEQ IDNO: 52
1)

[0875] LCVR (V_{L}) Amino Acid Sequence

DIVMTQSPLSLPVTPGEPASISCRSSQSLLHSNGYNYLDWYLQKPGQSPQ
FLIYLGSNRASGVPDRFSGSGSGTDFTLKINRVEAEDVGVYYCMQALQTP
YTFGQGTKLEIK (SEQ ID NO: 522)

LCDR1: QSLLHSNGYNY (SEQ ID NO: 523)

LCDR2: LGS (SEQ ID NO: 524)

LCDR3: MQALQTPYT (SEQ ID NO: 525)

### 69263

[0876] HCVR (V_{H}) Nucleotide Sequence

GAAGTGCAGCTGGTGGAGTCTGGGGGAGGGTTGGTACAGCCTGGCAGGTC
CCTGAGACTCTCCTGTGCAGTCTCTGGATTCACCTTTGATGATTATGCCA
TGCACTGGGTCCGGCAAGCTCCAGGGAAGGGCCTGGAGTGGGTCTCAGGT
ATTAGTTGGAATAGTGGTACCAGAGGATATGCGGACTCTGTGAAGGGCCG
ATTCACCATCTCCAGAGACAACGCCAAGAACTCCCTGTATCTGCAAATGA
ACAGTCTGAGAGGTGAGGACACGGCCTTGTATTACTGTGTAAAAGATATT
ACGATATCCCCCAACTACTACGGTATGGACGTCTGGGGCCAAGGGACCAC
GGTCACCGTCTCCTCA (SEQ ID NO: 526)

[0877] HCVR (V_{H}) Amino Acid Sequence

EVQLVESGGGLVQPGRSLRLSCAVSGFTFDDYAMHWVRQAPGKGLEWVSG
ISWNSGTRGYADSVKGRFTISRDNAKNSLYLQMNSLRGEDTALYYCVKDI
TISPNYYGMDVWGQGTTVTVSS (SEQ ID NO: 527)

HCDR1:GFTFDDYA (SEQ ID NO: 528)

HCDR2:ISWNSGTR (SEQ ID NO: 529)

HCDR3: VKDITISPNYYGMDV (SEQ ID NO: 530)

[0878] LCVR (V_{L}) Nucleotide Sequence

GACATCCAGATGACCCAGTCTCCATCCTCCCTGTCTGCATCTGTAGGAGA
CAGAGTCACCATCACTTGCCGGGCGAGTCAGGACATTAGCCATTATTCAG
CCTGGTATCAGCAGAAACCAGGGAAACTTCCTAACCTCCTGATCTATGCT
GCATCCACTTTGCAATCAGGGGTCCCATCTCGGTTCAGTGGCAGTGGATC
TGGGACAGATTTCTCTCTCACCACCAGCAGCCTGCAGCCTGAAGATGTTG
CAACTTATTACTGTCAAAAGTATAACAGTGTCCCTCTCACTTTCGGCGGA
GGGACCAAGGTGGAGATCAAA (SEQ ID NO: 531)

[0879] LCVR (V_{L}) Amino Acid Sequence

DIQMTQSPSSLSASVGDRVTITCRASQDISHYSAWYQQKPGKLPNLLIYA
ASTLQSGVPSRFSGSGSGTDFSLTTSSLQPEDVATYYCQKYNSVPLTFGG
GTKVEIK (SEQ ID NO: 532)

LCDR1: QDISHY (SEQ ID NO: 533)

LCDR2: AAS (SEQ ID NO: 534)

LCDR3: QKYNSVPLT (SEQ ID NO: 535)

TABLE 30

Anti-hTfR scFv Molecules in Fusion Proteins

| Antibody clone | SEQ ID NO | Amino acid sequence (Vk-3xG4S-Vh) |
|---|---|---|
| 12795B | 538 | DIQMTQSPSSLSASVGDRVTITCRASQGIRDHFGWYQQKPGKAPKRLIYAASSLHSGVPSRFS GSGSGTEFTLTISSLQPEDFATYYCLQYDTYPLTFGGGTKVEIKGGGGSGGGGSGGGGSEVQ LVESGGGLVQPGGSLRLSCATSGFTFTSYDMKWVRQAPGLGLEWVSAISGSGGNTYYADSV KGRFTISRDNSRNTLYLQMNSLRAEDTAVYYCTRSHDFGAFDYFDYWGQGTLVTVSS |
| 12798B | 539 | EIVMTQSPATLSVSPGERATLSCRASQTVSSNLAWYQQKPGQAPRLLIYGSSSRATGIPARFS GSGSGTEFTLTISSLQSEDFAVYYCQQYNNWPPYTFGQGTKLEIKGGGGSGGGGSGGGGSEV QLVESGGDLVQPGRSLRLSCAASGFTFDDYAMHWVRQAPGKGLEWVSGISWNSATRVYAD SVKGRFTISRDNAKNFLYLQMNSLRSEDTALYHCAKDMDISLGYYGLDVWGQGTTVTVSS |
| 12799B | 540 | DIQMTQSPSSVSASVGDRVTITCRASQGIASWLAWYQQKPGKAPELLIYAASSLQGGVPSRF SGSGSGTDFTLTISSLQPEDFAIYYCQQANYFPWTFGQGTKVEIKGGGGSGGGGSGGGGSQIT LKESGPTLVKPTQTLTLTCTFSGFSLSTSGVGVVWIRQPPGKALEWLALIYWNDHKRYSPSL GSRLTITKDTSKNQVVLTMTNMDPVDTATYYCAHYSGSYSYYYYGLDVWGQGTTVTVSS |
| 12801B | 541 | DIQMTQSPSSLSASVGDRVTITCRASQGIRTDLGWYQQKPGKAPKRLIYAASSLQSGVPSRFS GSGSGTEFTLTISSLRPEDFATFYCLQYNSYPLTFGGGTKVEIKGGGGSGGGGSGGGGSEVQL LESGGALVQPGGSLRLSCAASGFTFTSYAMHWVRQAPGKGLEWVSSIRGSGGGTYSADSVK GRFTISRDNSRDTLYLQMNSVRAEDTAVYYCARSHDYGAFDFFDYWGQGTLVTVSS |
| 12802B | 542 | EIVMTQSPATLSVSPGERATLSCRASQSVSINLAWYQQKPGQAPRLLIFVASTRATGIPARFSG SGSGTEFTLTISSLQSEDFATYYCQQYDIWPYTFGQGTKLEIKGGGGSGGGGSGGGGSQVQL VESGGGLVKPGGSLRLSCAASGFTFSDYFMSWIRQAPGKGLEWVSYISSTGSTINYADSVKG RFTISRDNVKNSLYLQMTSLRVEDTAVYYCTRDNWNYEYWGQGTLVTVSS |
| 12808B | 543 | DIQMTQSPSSLSASVGDRVTINCRASQGIRNDLGWYQQKPGKAPKRLIYAASSLQSGVPLRFS GSGSGTEFTLTINNLQPEDFATYYCLSHNSYPWTFGQGTKVEfKGGGGSGGGGSGGGGSQLQ LQESGPGLVKPSETLSLTCTVSGESISSNTYYWGWIRQPPGKGLEWIGSIDYSGTTNYNPSLK SRVTISVDTSRNHFSLRLRSVTAADTAVYYCAREWGNYGYYYGMDVWGQGTTVTVSS |
| 12812B | 544 | DIQMTQSPPSVSASVGDRVTITCRASQGISSWLAWYQQKPGKAPKLLIYAASSLQSGVPSRFS GSGSGTDFTLTISSLQPEDFATYYCQQANSFPRTFGQGTKVEIKGGGGSGGGGSGGGGSQVQ LVQSGAEVKKPGSSVRVSCKASRGTFSSYAISWVRQAPGQGLEWMGGIIPIFGTANYAQKFL ARVTITADESTSTAYMELSSLRSEDTAVYYCAREKGWNYFDYWGQGTLVTVSS |
| 12816B | 545 | DIVMTQSPLSLPVTPGEPASISCRSSQSLLHGNGYNYLTWYLQKPGQSPQLLIYLGSNRASGV PDRFSGSGSGTDFTLKISRVEAEDVGVYYCMQALQTPYTFGQGTKLEIKGGGGSGGGGSGG GGSQVQLVESGGGLVKPGGSLRLSCAASGFTFSDYYMNWIRQAPGKGLEWVSYISSSGTTIY YADSVKGRFTISRDNAKKSLYLEMNSLRAEDTAVYYCAREGYGNDYYYYGIDVWGQGTTV TVSS |
| 12833B | 546 | DIQMTQSPSSLSASVGDRVTITCRASQSISSYLNWYQQKPGKAPKLLIYAASSLQSGVPSRFS GSGSGTDFTLTISSLQPEDFATYYCQQSYSTPPITFGQGTRLEIKGGGGSGGGGSGGGGSQVQ LVESGGGVVQPGRSLRLSCAASGFTFSSFGMHWVRQAPGKGLEWVIFISYDGSDKYYADSV KGRFAISRDSSKNTLYLQMNSLRAEDTAVYYCAKENGILTDSYGMDVWGQGTTVTVSS |
| 12834B | 547 | DIQMTQSPSSLSASVGDRVTITCRASQSISSYLNWYQQKPGKAPKLLIYAASSLQSGVPSRFS GSGSGTDFTLTISSLQPEDFATYYCQQSYSTPPITFGQGTRLEIKGGGGSGGGGSGGGGSQVQ LVQSGAEVKKPGASVKVSCKASGYTFTSYGISWVRQAPGQGLEWMGWISVYHGNTNYAQ KFQGRVTMTTDTSTSTAYMELRSLRSDDTAVYYCAREGYYDFWSGYYPFDYWGQGTLVT VSS |
| 12835B | 548 | DIQMTQSPSSLSASVGDRVTITCRASQSISSYLNWYQQKPGKAPKLLIYAASSLQSGVPSRFS GSGSGTDFTLTISSLQPEDFATYYCQQSYSTPPITFGQGTRLEIKGGGGSGGGGSGGGGSEVQ LVESGGGLIQPGGSLRLSCEASGFTFRNYEMNWVRQAPGKGLEWVSYISSSGNMKDYAESV KGRFTISRDNVKNSLQLQMNSLRVEDTAVYYCARDEFPYGMDVWGQGTTVTVSS |
| 12839B | 549 | DIQMTQSPSSLSASVGDRVTITCRASQSISSYLNWYQQKPGKAPKLLIYAASSLQSGVPSRFS GSGSGTDFTLTISSLQPEDFATYYCQQSYSTPPITFGQGTRLEIKGGGGSGGGGSGGGGSQVQ LVESGGGVVQPGRSLRLSCAASGFPFSNYVMYWVRQAPGKGLEWVALIFFDGKKNYHADS VKGRFTITRDNSKNMLYLQMNSLRPEDAAVYYCAKIHCPNGVCYKGYYGMDVWGQGTTV TVSS |
| 12841B | 550 | DIQMTQSPSSLSASVGDRVTITCRASQSISSYLNWYQQKPGKAPKLLIYAASSLQSGVPSRFS GSGSGTDFTLTISSLQPEDFATYYCQQSYSTPPITFGQGTRLEIKGGGGSGGGGSGGGGSEVQ LVESGGGLVQPGGSLRLSCAASGFTFSNYWMNWVRQAPGKGLEWVANIKEDGGKKLYVD SVKGRFTISRDNAKNSLFLQMNSLRAEDTAVYYCAREDTTLVVDYYYYGMDVWGQGTTV TVSS |
| 12843B | 551 | DIQMTQSPSSLSASVGDRVTITCRASQSISSYLNWYQQKPGKAPKLLIYAASSLQSGVPSRFS GSGSGTDFTLTISSLQPEDFATYYCQQSYSTPPITFGQGTRLEIKGGGGSGGGGSGGGGSEVQ LVESGGGLVQPGGSLRLSCAASGFTFNIFEMNWVRQAPGKGLEWISYISSRGTTTYYADSVR GRFTISRDNAKNSLYLQMNSLRAEDTAVYYCARDYEATIPFDFWGQGTLVTVSS |
| 12844B | 552 | DIQMTQSPSSLSASVGDRVTITCRASQSISSYLNWYQQKPGKAPKLLIYAASSLQSGVPSRFS GSGSGTDFTLTISSLQPEDFATYYCQQSYSTPPITFGQGTRLEIKGGGGSGGGGSGGGGSEVQ LVESGGSVVRPGGSLRLSCEASGFTFDDYGMSWVRQDPGKGLEWVSGINWNGDRTNYADS VKGRFIISRDNAKNSVYLQMNSLRAEDSALYHCARDQGLGVAATLDYWGQGTLVTVSS |
| 12845B | 553 | DIQMTQSPSSLSASVGDRVTITCRASQSISSYLNWYQQKPGKAPKLLIYAASSLQSGVPSRFS GSGSGTDFTLTISSLQPEDFATYYCQQSYSTPPITFGQGTRLEIKGGGGSGGGGSGGGGSEVQ LVESGGGLVQPGGSLRLSCAASGFTVSNYEMNWVRQAPGKGLEWVSYISSSTSNIYYADSV KGRFTISRDNAENSLYLQMNSLRVEDTAVYYCVRDGIVVVPVGRGYYYYGLDVWGQGTTV TVSS |
| 12847B | 554 | DIQMTQSPSSLSASVGDRVTITCRASQSISSYLNWYQQKPGKAPKLLIYAASSLQSGVPSRFS GSGSGTDFTLTISSLQPEDFATYYCQQSYSTPPITFGQGTRLEIKGGGGSGGGGSGGGGSEVQ LVESGGGLVQPGRSLRLSCAASGFTFDDYAMNWVRQAPGKGLEWVSGISWSSGSMDYADS VKGRFTISRDNAKNSLYLQMNSLRTEDTALYYCAKAREVGDYYGMDVWGQGTTVTVSS |
| 12848B | 555 | EIVLTQSPGTLSLSPGERATLSCRASQSVSSSYLAWYQQKPGQAPRLLIYGASSRATGIPDRFS GSGSGTDFTL TISRLEPEDF A VYYCQQYGSSPWTFGQGTKVEIKGGGGSGGGGSGGGGSEVQ LVESGGGLVQPGRSLTLSCAASGFTFDNFGMHWVRQGPGKGLEWVSGLTWNSGVIGYADS VKGRFTISRDNAKNSLYLQMNSLRPEDTALYYCAKDIRNYGPFDYWGQGTLVTVSS |
| 12850B | 556 | EIVLTQSPGTLSLSPGERATLSCRASQSVSSSYLAWYQQKPGQAPRLLIYGASSRATGIPDRFS GSGSGTDFTLTISRLEPEDFAVYYCQQYGSSPWTFGQGTKVEIKGGGGSGGGGSGGGGSQV QLVQSGAEVKKPGSSVKVSCKASGGTFNTYAITWVRQAPGQGLEWMGGIIPISGIAEYAQKF QGRVTITTDDSSTTAYMELNSLRSEDTAVYYCASWNYALYYFYGMDVWGRGTTVTVSS |
| 31863B | 557 | DIQMTQSPSSLSASIGDRVTITCRASQGISNYLAWYQQKPGKVPKLLIYAASTLQSGVPSRFS GSGSGTDFTLTISSLQPEDVATYYCQNHNSVPLTFGGGTKVEIKGGGGSGGGGSGGGGSEVQ LVESGGGLVQPGGSLRLSCAASGFTFNSYAMTWVRQAPGKGLEWVSFIGGSTGNTYYAGSV KGRFTISSDNSKKTLYLQMNSLRAEDTAVYYCAKGGAARRMEYFQHWGQGTLVTVSS |
| 31874B | 558 | DIQMTQSPSSLSASVGDRVTITCRASQGISNYLAWYQQKPGKVPNLLIYAASTLQSGVPSRFS GSGSGTDFTLTISSLQPEDVATYYCQKYNSAPLTFGGGTKVEIKGGGGSGGGGSGGGGSEVQ LVESGGGLVQPGGSLRLSCAASGFAFSSYAMTWVRQAPGKGLEWVSVISGTGGSTYYADSV KGRFTISRDNSKNTLYLQMNSLRAEDTAVYYCAKGGAARRMEYFQYWGQGTLVTVSS |
| 69261 | 559 | DIVMTQSPLSLPVTPGEPASISCRSSQSLLHSNGYNYLDWYLQKPGQSPQFLIYLGSNRASGV PDRFSGSGSGTDFTLKINRVEAEDVGVYYCMQALQTPYTFGQGTKLEIKGGGGSGGGGSGG GGSQVQLVESGGGLVKPGGSLRLSCAASGFTFSVYYMNWIRQAPGKGLEWVSYISSSGSTIY YADSVKGRFTISRDNAKNSLYLQMNSLRAEDTAVYYCGREGYSGTYSYYGMDVWGQGTT VTVSS |
| 69263 | 560 | DIQMTQSPSSLSASVGDRVTITCRASQDISHYSAWYQQKPGKLPNLLIYAASTLQSGVPSRFS GSGSGTDFSLTTSSLQPEDVATYYCQKYNSVPLTFGGGTKVEIKGGGGSGGGGSGGGGSEV QLVESGGGLVQPGRSLRLSCAVSGFTFDDYAMHWVRQAPGKGLEWVSGISWNSGTRGYAD SVKGRFTISRDNAKNSLYLQMNSLRGEDTALYYCVKDITISPNYYGMDVWGQGTTVTVSS |
| 69305 | 561 | DIQMTQSPSSLSASVGDRVTITCRASQSIDRYLNWYRQKPGKAPKLLIYTTSSLQSGVPSRFS GSGSGTDFTLTLSSLQPEDFATYYCQQSYSPPLTFGGGTKVEIKGGGGSGGGGSGGGGSQVQ LVESGGGVVQPGRSLRLSCAASGFTFSSYGMHWVRQAPGKGLEWVAVIWYDGSNKYYAD SVKGRFTISRDISKNTLYLQMNSLRAEDTAVYYCAGQLDLFFDYWGQGTLVTVSS |
| 69307 | 562 | DIQMTQSPSSVSASVGDRVTITCRASQGISSWLAWYQQKPGKAPKLLIYAASSLQSGVPSRFS GSGSGTDFTLTISSLQPEDFATYYCQKADSLPYAFGQGTKLEIKGGGGSGGGGSGGGGSEVQ LVESGGGLVQPGGSLRLSCTASGFTFSNYWMTWVRQAPGKGLEWVANIKEDGSEKEYVDS VKGRFTISRDNAKNSLYLQMNSLRGEDTAVYYCARDGEQLVDYYYYYVMDVWGQGTTVT VSS |
| 69323 | 563 | DIQMTQSPSSLSASVGDRVTITCRASQSISSYLNWYQQKPGKAPKVLIYAASSLQSGVPSRFS GSGSGTDFTLTISSLQPEDFATYYCQQSYSIPLTFGGGTKVEIKGGGGSGGGGSGGGGSEVQL VESGGGLVQPGRSLRLSCAASGFTFDDYAMHWVRQAPGKGLEWVSGISWNSGYIGYADSV KGRFTISRDNAENSLHLQMNSLRAEDTALYYCARGGSTLVRGVKGGYYGMDVWGQGTTV TVSS |
| 69326 | 564 | EIVMTQSPATLSVSPGERATLSCRASQSVSSNFAWYQQKPGQAPRLLIYSASSRATGIPVRFS GSGSGTEFTLTISSLQSEDFAVYYCQQYNIWPRTFGQGTKVEIKGGGGSGGGGSGGGGSEVQ LVESGGGLVQPGGSLRLSCAVSGFIFSSYEMNWVRQAPGKGLEWVSYISSSGSTIFYADSVK GRFTISRDNAKNSLYLOMNSLRAEDTAVYYCVSGVVLFDVWGQGTMVTVSS |
| 69329 | 565 | DIQMTQSPSSVSASVGDRVTITCRASQGISSWLAWYQQKPGKAPKLLIYAASSLQSGVPSRFS GSGSGTDFTLTISSLQPEDFATYYCQKANSFPYTFGQGTKLEIKGGGGSGGGGSGGGGSEVQ LVESGGGLVQPGGSLRLSCAASGFTFSNYWMTWVRQAPGKGLEWVANIKEDGSEKDYVDS VKGRFTISRDNAKNSLYLQMNSLRGEDTAVYYCARDGEQLVDYYYYYVMDVWGQGTTVT VSS |
| 69331 | 566 | DIQLTQSPSSLSASVGDRVTITCWASQGISSYLAWYQQKPGKAPKLLIYAASTLQSGVPSRFS GSGSGTEFTLTISSLQPEDFATYYCQQLNSYPLTFGGGTKVEIKGGGGSGGGGSGGGGSQVQ LVESGGGVVQPGRSLRLSCIASGFTFSVYGIHWVRQAPGKGLEWMAVISHDGNIKHYADSV KGRFTISRDNSKNTLYLQINSLRTEDTAVYYCAKDTWNSLDTFDIWGQGTMVTVSS |
| 69332 | 567 | AIQMTQSPSSLSASVGDRVTITCRASQGIRNDLGWYQQKPGKAPKLLIYAASTLQSGVPSRFS GSGSGTDFTLTISSLQPEDFATYYCLQDYNYPFTFGPGTKVDIKGGGGSGGGGSGGGGSQVT LRESGPALVKPSQTLTLTCTFSGFSLNTYGMFVSWIRQPPGKALEWLAHIHWDDDKYYSTSL KTRLTISKDTSKNQVVLTMTNMDPVDTATYYCARGHNNLNYIIHWGQGTLVTVSS |
| 69340 | 568 | EIVLTQSPATLSLSPGERATLSCRASQSVSSYLAWYQQKPGQAPRLLIHDVSNRATGIPARFS GSGSGTDFTLTISSLEPEDFVVYYCQQRSDWPITFGQGTRLEIKGGGGSGGGGSGGGGSEVQ LVESGGGLVQPGRSLRLSCAASGFTFDDKAMHWVRQVPGKGLEWISGISWNSGTIGYADSV KGRFIISRDNAKNSLYLQMNSLRAEDTALYYCAKDGDTSGWYWYGLDVWGQGTTVTVSS |
| 69348 | 569 | DIQMTQSPSSLSASVGDRVTITCRASQSIRNVLGWFQQKPGKAPQRLIYAASSLQSGVPSRFS GSGSGTEFTLTISSLQPEDFATYYCLQHNFYPLTFGGGTKVEIKGGGGSGGGGSGGGGSQVQ LVESGGGVVQPGRSLRLSCAASGFTFTTYGMHWVRQAPGKGLEWVAVIWYDGSNKYYGD SVKGRFTISRDNSKNTLYLQMNSLRVDDTAVYYCTRTHGYTRSSDGFDYWGQGTLVTVSS |

### Heavy and Light Chains of Anti-hTfR Fabs in Anti-hTfRGAA Fusion Proteins

### 31874B

[0880] Fab Light Chain

DIQMTQSPSSLSASVGDRVTITCRASQGISNYLAWYQQKPGKVPNLLIYA
ASTLQSGVPSRFSGSGSGTDFTLTISSLQPEDVATYYCQKYNSAPLTFGG
GTKVEIKRTVAAPSVFIFPPSDEQLKSGTASVVCLLNNFYPREAKVQWKV
DNALQSGNSQESVTEQDSKDSTYSLSSTLTLSKADYEKHKVYACEVTHQG
LSSPVTKSFNRGEC(SEQ ID NO: 603)

[0881] Fab Heavy Chain

EVQLVESGGGLVQPGGSLRLSCAASGFAFSSYAMTWVRQAPGKGLEWVSV
ISGTGGSTYYADSVKGRFTISRDNSKNTLYLQMNSLRAEDTAVYYCAKGG
AARRMEYFQYWGQGTLVTVSSASTKGPSVFPLAPSSKSTSGGTAALGCLV
KDYFPEPVTVSWNSGALTSGVHTFPAVLQSSGLYSLSSVVTVPSSSLGTQ
TYICNVNHKPSNTKVDKKVEPKSCDKTH (SEQ ID NO: 604)

### 31863B

[0882] Fab Light Chain

DIQMTQSPSSLSASIGDRVTITCRASQGISNYLAWYQQKPGKVPKLLIYA
ASTLQSGVPSRFSGSGSGTDFTLTISSLQPEDVATYYCQNHNSVPLTFGG
GTKVEIKRTVAAPSVFIFPPSDEQLKSGTASVVCLLNNFYPREAKVQWKV
DNALQSGNSQESVTEQDSKDSTYSLSSTLTLSKADYEKHKVYACEVTHQG
LSSPVTKSFNRGEC(SEQ ID NO: 605)

[0883] Fab Heavy Chain

EVQLVESGGGLVQPGGSLRLSCAASGFTFNSYAMTWVRQAPGKGLEWVSF
IGGSTGNTYYAGSVKGRFTISSDNSKKTLYLQMNSLRAEDTAVYYCAKGG
AARRMEYFQHWGQGTLVTVSSASTKGPSVFPLAPSSKSTSGGTAALGCLV
KDYFPEPVTVSWNSGALTSGVHTFPAVLQSSGLYSLSSVVTVPSSSLGTQ
TYICNVNHKPSNTKVDKKVEPKSCDKTH (SEQ ID NO: 606)

### 69348

[0884] Fab Light Chain

DIQMTQSPSSLSASVGDRVTITCRASQSIRNVLGWFQQKPGKAPQRLIYA
ASSLQSGVPSRFSGSGSGTEFTLTISSLQPEDFATYYCLQHNFYPLTFGG
GTKVEIKRTVAAPSVFIFPPSDEQLKSGTASVVCLLNNFYPREAKVQWKV
DNALQSGNSQESVTEQDSKDSTYSLSSTLTLSKADYEKHKVYACEVTHQG
LSSPVTKSFNRGEC(SEQ ID NO: 607)

[0885] Fab Heavy Chain

QVQLVESGGGVVQPGRSLRLSCAASGFTFTTYGMHWVRQAPGKGLEWVAV
IWYDGSNKYYGDSVKGRFTISRDNSKNTLYLQMNSLRVDDTAVYYCTRTH
GYTRSSDGFDYWGQGTLVTVSSASTKGPSVFPLAPSSKSTSGGTAALGCL
VKDYFPEPVTVSWNSGALTSGVHTFPAVLQSSGLYSLSSVVTVPSSSLGT
QTYICNVNHKPSNTKVDKKVEPKSCDKTH (SEQ ID NO: 608)

### 69340

[0886] Fab Light Chain

EIVLTQSPATLSLSPGERATLSCRASQSVSSYLAWYQQKPGQAPRLLIHD
VSNRATGIPARFSGSGSGTDFTLTISSLEPEDFVVYYCQQRSDWPITFGQ
GTRLEIKRTVAAPSVFIFPPSDEQLKSGTASVVCLLNNFYPREAKVQWKV
DNALQSGNSQESVTEQDSKDSTYSLSSTLTLSKADYEKHKVYACEVTHQG
LSSPVTKSFNRGEC(SEQ ID NO: 609)

[0887] Fab Heavy Chain

EVQLVESGGGLVQPGRSLRLSCAASGFTFDDKAMHWVRQVPGKGLEWISG
ISWNSGTIGYADSVKGRFIISRDNAKNSLYLQMNSLRAEDTALYYCAKDG
DTSGWYWYGLDVWGQGTTVTVSSASTKGPSVFPLAPSSKSTSGGTAALGC
LVKDYFPEPVTVSWNSGALTSGVHTFPAVLQSSGLYSLSSVVTVPSSSLG
TQTYICNVNHKPSNTKVDKKVEPKSCDKTH (SEQ ID NO: 610)

### 69331

[0888] Fab Light Chain

DIQLTQSPSSLSASVGDRVTITCWASQGISSYLAWYQQKPGKAPKLLIYA
ASTLQSGVPSRFSGSGSGTEFTLTISSLQPEDFATYYCQQLNSYPLTFGG
GTKVEIKRTVAAPSVFIFPPSDEQLKSGTASVVCLLNNFYPREAKVQWKV
DNALQSGNSQESVTEQDSKDSTYSLSSTLTLSKADYEKHKVYACEVTHQG
LSSPVTKSFNRGEC(SEQ ID NO: 611)

[0889] Fab Heavy Chain

QVQLVESGGGVVQPGRSLRLSCIASGFTFSVYGIHWVRQAPGKGLEWMAV
ISHDGNIKHYADSVKGRFTISRDNSKNTLYLQINSLRTEDTAVYYCAKDT
WNSLDTFDIWGQGTMVTVSSASTKGPSVFPLAPSSKSTSGGTAALGCLVK
DYFPEPVTVSWNSGALTSGVHTFPAVLQSSGLYSLSSVVTVPSSSLGTQT
YICNVNHKPSNTKVDKKVEPKSCDKTH (SEQ ID NO: 612)

### 69332

[0890] Fab Light Chain

AIQMTQSPSSLSASVGDRVTITCRASQGIRNDLGWYQQKPGKAPKLLIYA
ASTLQSGVPSRFSGSGSGTDFTLTISSLQPEDFATYYCLQDYNYPFTFGP
GTKVDIKRTVAAPSVFIFPPSDEQLKSGTASVVCLLNNFYPREAKVQWKV
DNALQSGNSQESVTEQDSKDSTYSLSSTLTLSKADYEKHKVYACEVTHQG
LSSPVTKSFNRGEC(SEQ ID NO: 613)

[0891] Fab Heavy Chain

QVTLRESGPALVKPSQTLTLTCTFSGFSLNTYGMFVSWIRQPPGKALEWL
AHIHWDDDKYYSTSLKTRLTISKDTSKNQVVLTMTNMDPVDTATYYCARG
HNNLNYIIHWGQGTLVTVSSASTKGPSVFPLAPSSKSTSGGTAALGCLVK
DYFPEPVTVSWNSGALTSGVHTFPAVLQSSGLYSLSSVVTVPSSSLGTQT
YICNVNHKPSNTKVDKKVEPKSCDKTH (SEQ ID NO: 614)

### 69326

[0892] Fab Light Chain

EIVMTQSPATLSVSPGERATLSCRASQSVSSNFAWYQQKPGQAPRLLIYS
ASSRATGIPVRFSGSGSGTEFTLTISSLQSEDFAVYYCQQYNIWPRTFGQ
GTKVEIKRTVAAPSVFIFPPSDEQLKSGTASVVCLLNNFYPREAKVQWKV
DNALQSGNSQESVTEQDSKDSTYSLSSTLTLSKADYEKHKVYACEVTHQG
LSSPVTKSFNRGEC(SEQ ID NO: 615)

[0893] Fab Heavy Chain

EVQLVESGGGLVQPGGSLRLSCAVSGFIFSSYEMNWVRQAPGKGLEWVSY
ISSSGSTIFYADSVKGRFTISRDNAKNSLYLQMNSLRAEDTAVYYCVSGV
VLFDVWGQGTMVTVSSASTKGPSVFPLAPSSKSTSGGTAALGCLVKDYFP
EPVTVSWNSGALTSGVHTFPAVLQSSGLYSLSSVVTVPSSSLGTQTYICN
VNHKPSNTKVDKKVEPKSCDKTH (SEQ ID NO: 616)

### 69329

[0894] Fab Light Chain

DIQMTQSPSSVSASVGDRVTITCRASQGISSWLAWYQQKPGKAPKLLIYA
ASSLQSGVPSRFSGSGSGTDFTLTISSLQPEDFATYYCQKANSFPYTFGQ
GTKLEIKRTVAAPSVFIFPPSDEQLKSGTASVVCLLNNFYPREAKVQWKV
DNALQSGNSQESVTEQDSKDSTYSLSSTLTLSKADYEKHKVYACEVTHQG
LSSPVTKSFNRGEC(SEQ ID NO: 617)

[0895] Fab Heavy Chain

EVQLVESGGGLVQPGGSLRLSCAASGFTFSNYWMTWVRQAPGKGLEWVAN
IKEDGSEKDYVDSVKGRFTISRDNAKNSLYLQMNSLRGEDTAVYYCARDG
EQLVDYYYYYVMDVWGQGTTVTVSSASTKGPSVFPLAPSSKSTSGGTAAL
GCLVKDYFPEPVTVSWNSGALTSGVHTFPAVLQSSGLYSLSSVVTVPSSS
LGTQTYICNVNHKPSNTKVDKKVEPKSCDKTH (SEQ ID NO: 618)

### 69323

[0896] Fab Light Chain

DIQMTQSPSSLSASVGDRVTITCRASQSISSYLNWYQQKPGKAPKVLIYA
ASSLQSGVPSRFSGSGSGTDFTLTISSLQPEDFATYYCQQSYSIPLTFGG
GTKVEIKRTVAAPSVFIFPPSDEQLKSGTASVVCLLNNFYPREAKVQWKV
DNALQSGNSQESVTEQDSKDSTYSLSSTLTLSKADYEKHKVYACEVTHQG
LSSPVTKSFNRGEC(SEQ ID NO: 619)

[0897] Fab Heavy Chain

EVQLVESGGGLVQPGRSLRLSCAASGFTFDDYAMHWVRQAPGKGLEWVSG
ISWNSGYIGYADSVKGRFTISRDNAENSLHLQMNSLRAEDTALYYCARGG
STLVRGVKGGYYGMDVWGQGTTVTVSSASTKGPSVFPLAPSSKSTSGGTA
ALGCLVKDYFPEPVTVSWNSGALTSGVHTFPAVLQSSGLYSLSSVVTVPS
SSLGTQTYICNVNHKPSNTKVDKKVEPKSCDKTH (SEQ ID NO: 620
)

### 69305

[0898] Fab Light Chain

DIQMTQSPSSLSASVGDRVTITCRASQSIDRYLNWYRQKPGKAPKLLIYT
TSSLQSGVPSRFSGSGSGTDFTLTLSSLQPEDFATYYCQQSYSPPLTFGG
GTKVEIKRTVAAPSVFIFPPSDEQLKSGTASVVCLLNNFYPREAKVQWKV
DNALQSGNSQESVTEQDSKDSTYSLSSTLTLSKADYEKHKVYACEVTHQG
LSSPVTKSFNRGEC(SEQ ID NO: 621)

[0899] Fab Heavy Chain

QVQLVESGGGVVQPGRSLRLSCAASGFTFSSYGMHWVRQAPGKGLEWVAV
IWYDGSNKYYADSVKGRFTISRDISKNTLYLQMNSLRAEDTAVYYCAGQL
DLFFDYWGQGTLVTVSSASTKGPSVFPLAPSSKSTSGGTAALGCLVKDYF
PEPVTVSWNSGALTSGVHTFPAVLQSSGLYSLSSVVTVPSSSLGTQTYIC
NVNHKPSNTKVDKKVEPKSCDKTH (SEQ ID NO: 622)

### 69307

[0900] Fab Light Chain

DIQMTQSPSSVSASVGDRVTITCRASQGISSWLAWYQQKPGKAPKLLIYA
ASSLQSGVPSRFSGSGSGTDFTLTISSLQPEDFATYYCQKADSLPYAFGQ
GTKLEIKRTVAAPSVFIFPPSDEQLKSGTASVVCLLNNFYPREAKVQWKV
DNALQSGNSQESVTEQDSKDSTYSLSSTLTLSKADYEKHKVYACEVTHQG
LSSPVTKSFNRGEC(SEQ ID NO: 623)

[0901] Fab Heavy Chain

EVQLVESGGGLVQPGGSLRLSCTASGFTFSNYWMTWVRQAPGKGLEWVAN
IKEDGSEKEYVDSVKGRFTISRDNAKNSLYLQMNSLRGEDTAVYYCARDG
EQLVDYYYYYVMDVWGQGTTVTVSSASTKGPSVFPLAPSSKSTSGGTAAL
GCLVKDYFPEPVTVSWNSGALTSGVHTFPAVLQSSGLYSLSSVVTVPSSS
LGTQTYICNVNHKPSNTKVDKKVEPKSCDKTH (SEQ ID NO: 624)

### 12795B

[0902] Fab Light Chain

DIQMTQSPSSLSASVGDRVTITCRASQGIRDHFGWYQQKPGKAPKRLIYA
ASSLHSGVPSRFSGSGSGTEFTLTISSLQPEDFATYYCLQYDTYPLTFGG
GTKVEIKRTVAAPSVFIFPPSDEQLKSGTASVVCLLNNFYPREAKVQWKV
DNALQSGNSQESVTEQDSKDSTYSLSSTLTLSKADYEKHKVYACEVTHQG
LSSPVTKSFNRGEC(SEQ ID NO: 625)

[0903] Fab Heavy Chain

EVQLVESGGGLVQPGGSLRLSCATSGFTFTSYDMKWVRQAPGLGLEWVSA
ISGSGGNTYYADSVKGRFTISRDNSRNTLYLQMNSLRAEDTAVYYCTRSH
DFGAFDYFDYWGQGTLVTVSSASTKGPSVFPLAPSSKSTSGGTAALGCLV
KDYFPEPVTVSWNSGALTSGVHTFPAVLQSSGLYSLSSVVTVPSSSLGTQ
TYICNVNHKPSNTKVDKKVEPKSCDKTH (SEQ ID NO: 626)

### 12798B (regn17078)

[0904] Fab Light Chain

EIVMTQSPATLSVSPGERATLSCRASQTVSSNLAWYQQKPGQAPRLLIYG
SSSRATGIPARFSGSGSGTEFTLTISSLQSEDFAVYYCQQYNNWPPYTFG
QGTKLEIKRTVAAPSVFIFPPSDEQLKSGTASVVCLLNNFYPREAKVQWK
VDNALQSGNSQESVTEQDSKDSTYSLSSTLTLSKADYEKHKVYACEVTHQ
GLSSPVTKSFNRGEC(SEQ ID NO: 627)

[0905] Fab Heavy Chain

EVQLVESGGDLVQPGRSLRLSCAASGFTFDDYAMHWVRQAPGKGLEWVSG
ISWNSATRVYADSVKGRFTISRDNAKNFLYLQMNSLRSEDTALYHCAKDM
DISLGYYGLDVWGQGTTVTVSSASTKGPSVFPLAPSSKSTSGGTAALGCL
VKDYFPEPVTVSWNSGALTSGVHTFPAVLQSSGLYSLSSVVTVPSSSLGT
QTYICNVNHKPSNTKVDKKVEPKSCDKTH (SEQ ID NO: 628); or

EVQLVESGGDLVQPGRSLRLSCAASGFTFDDYAMHWVRQAPGKGLEWVSG
ISWNSATRVYADSVKGRFTISRDNAKNFLYLQMNSLRSEDTALYHCAKDM
DISLGYYGLDVWGQGTTVTVSSASTKGPSVFPLAPCSRSTSESTAALGCL
VKDYFPEPVTVSWNSGALTSGVHTFPAVLQSSGLYSLSSVVTVPSSSLGT
KTYTCNVDHKPSNTKVDKRVESKYGPPLLQGSG (SEQ ID NO: 667)

### 12799B (regn17079)

[0906] Fab Light Chain

DIQMTQSPSSVSASVGDRVTITCRASQGIASWLAWYQQKPGKAPELLIYA
ASSLQGGVPSRFSGSGSGTDFTLTISSLQPEDFAIYYCQQANYFPWTFGQ
GTKVEIKRTVAAPSVFIFPPSDEQLKSGTASVVCLLNNFYPREAKVQWKV
DNALQSGNSQESVTEQDSKDSTYSLSSTLTLSKADYEKHKVYACEVTHQG
LSSPVTKSFNRGEC(SEQ ID NO: 629)

[0907] Fab Heavy Chain

QITLKESGPTLVKPTQTLTLTCTFSGFSLSTSGVGVVWIRQPPGKALEWL
ALIYWNDHKRYSPSLGSRLTITKDTSKNQVVLTMTNMDPVDTATYYCAHY
SGSYSYYYYGLDVWGQGTTVTVSSASTKGPSVFPLAPSSKSTSGGTAALG
CLVKDYFPEPVTVSWNSGALTSGVHTFPAVLQSSGLYSLSSVVTVPSSSL
GTQTYICNVNHKPSNTKVDKKVEPKSCDKTH (SEQ ID NO: 630);
or

QITLKESGPTLVKPTQTLTLTCTFSGFSLSTSGVGVVWIRQPPGKALEWL
ALIYWNDHKRYSPSLGSRLTITKDTSKNQVVLTMTNMDPVDTATYYCAHY
SGSYSYYYYGLDVWGQGTTVTVSSASTKGPSVFPLAPCSRSTSESTAALG
CLVKDYFPEPVTVSWNSGALTSGVHTFPAVLQSSGLYSLSSVVTVPSSSL
GTKTYTCNVDHKPSNTKVDKRVESKYGPPLLQGSG(SEQ ID NO: 668
)

### 12801B

[0908] Fab Light Chain

DIQMTQSPSSLSASVGDRVTITCRASQGIRTDLGWYQQKPGKAPKRLIYA
ASSLQSGVPSRFSGSGSGTEFTLTISSLRPEDFATFYCLQYNSYPLTFGG
GTKVEIKRTVAAPSVFIFPPSDEQLKSGTASVVCLLNNFYPREAKVQWKV
DNALQSGNSQESVTEQDSKDSTYSLSSTLTLSKADYEKHKVYACEVTHQG
LSSPVTKSFNRGEC(SEQ ID NO: 631)

[0909] Fab Heavy Chain

EVQLLESGGALVQPGGSLRLSCAASGFTFTSYAMHWVRQAPGKGLEWVSS
IRGSGGGTYSADSVKGRFTISRDNSRDTLYLOMNSVRAEDTAVYYCARSH
DYGAFDFFDYWGQGTLVTVSSASTKGPSVFPLAPSSKSTSGGTAALGCLV
KDYFPEPVTVSWNSGALTSGVHTFPAVLQSSGLYSLSSVVTVPSSSLGTQ
TYICNVNHKPSNTKVDKKVEPKSCDKTH (SEQ ID NO: 632)

### 12802B

[0910] Fab Light Chain

EIVMTQSPATLSVSPGERATLSCRASQSVSINLAWYQQKPGQAPRLLIFV
ASTRATGIPARFSGSGSGTEFTLTISSLQSEDFATYYCQQYDIWPYTFGQ
GTKLEIKRTVAAPSVFIFPPSDEQLKSGTASVVCLLNNFYPREAKVQWKV
DNALQSGNSQESVTEQDSKDSTYSLSSTLTLSKADYEKHKVYACEVTHQG
LSSPVTKSFNRGEC(SEQ ID NO: 633)

[0911] Fab Heavy Chain

QVQLVESGGGLVKPGGSLRLSCAASGFTFSDYFMSWIRQAPGKGLEWVSY
ISSTGSTINYADSVKGRFTISRDNVKNSLYLQMTSLRVEDTAVYYCTRDN
WNYEYWGQGTLVTVSSASTKGPSVFPLAPSSKSTSGGTAALGCLVKDYFP
EPVTVSWNSGALTSGVHTFPAVLQSSGLYSLSSVVTVPSSSLGTQTYICN
VNHKPSNTKVDKKVEPKSCDKTH (SEQ ID NO: 634)

### 12808B

[0912] Fab Light Chain

DIQMTQSPSSLSASVGDRVTINCRASQGIRNDLGWYQQKPGKAPKRLIYA
ASSLQSGVPLRFSGSGSGTEFTLTINNLQPEDFATYYCLSHNSYPWTFGQ
GTKVEIKRTVAAPSVFIFPPSDEQLKSGTASVVCLLNNFYPREAKVQWKV
DNALQSGNSQESVTEQDSKDSTYSLSSTLTLSKADYEKHKVYACEVTHQG
LSSPVTKSFNRGEC(SEQ ID NO: 635)

[0913] Fab Heavy Chain

QLQLQESGPGLVKPSETLSLTCTVSGESISSNTYYWGWIRQPPGKGLEWI
GSIDYSGTTNYNPSLKSRVTISVDTSRNHFSLRLRSVTAADTAVYYCARE
WGNYGYYYGMDVWGQGTTVTVSSASTKGPSVFPLAPSSKSTSGGTAALGC
LVKDYFPEPVTVSWNSGALTSGVHTFPAVLQSSGLYSLSSVVTVPSSSLG
TQTYICNVNHKPSNTKVDKKVEPKSCDKTH (SEQ ID NO: 636)

### 12812B

[0914] Fab Light Chain

DIQMTQSPPSVSASVGDRVTITCRASQGISSWLAWYQQKPGKAPKLLIYA
ASSLQSGVPSRFSGSGSGTDFTLTISSLQPEDFATYYCQQANSFPRTFGQ
GTKVEIKRTVAAPSVFIFPPSDEQLKSGTASVVCLLNNFYPREAKVQWKV
DNALQSGNSQESVTEQDSKDSTYSLSSTLTLSKADYEKHKVYACEVTHQG
LSSPVTKSFNRGEC(SEQ ID NO: 637)

[0915] Fab Heavy Chain

QVQLVQSGAEVKKPGSSVRVSCKASRGTFSSYAISWVRQAPGQGLEWMGG
IIPIFGTANYAQKFLARVTITADESTSTAYMELSSLRSEDTAVYYCAREK
GWNYFDYWGQGTLVTVSSASTKGPSVFPLAPSSKSTSGGTAALGCLVKDY
FPEPVTVSWNSGALTSGVHTFPAVLQSSGLYSLSSVVTVPSSSLGTQTYI
CNVNHKPSNTKVDKKVEPKSCDKTH (SEQ ID NO: 638)

### 12816B

[0916] Fab Light Chain

DIVMTQSPLSLPVTPGEPASISCRSSQSLLHGNGYNYLTWYLQKPGQSPQ
LLIYLGSNRASGVPDRFSGSGSGTDFTLKISRVEAEDVGVYYCMQALQTP
YTFGQGTKLEIKRTVAAPSVFIFPPSDEQLKSGTASVVCLLNNFYPREAK
VQWKVDNALQSGNSQESVTEQDSKDSTYSLSSTLTLSKADYEKHKVYACE
VTHQGLSSPVTKSFNRGEC (SEQ ID NO: 639)

[0917] Fab Heavy Chain

QVQLVESGGGLVKPGGSLRLSCAASGFTFSDYYMNWIRQAPGKGLEWVSY
ISSSGTTIYYADSVKGRFTISRDNAKKSLYLEMNSLRAEDTAVYYCAREG
YGNDYYYYGIDVWGQGTTVTVSSASTKGPSVFPLAPSSKSTSGGTAALGC
LVKDYFPEPVTVSWNSGALTSGVHTFPAVLQSSGLYSLSSVVTVPSSSLG
TQTYICNVNHKPSNTKVDKKVEPKSCDKTH (SEQ ID NO: 640)

### 12833B

[0918] Fab Light Chain

DIQMTQSPSSLSASVGDRVTITCRASQSISSYLNWYQQKPGKAPKLLIYA
ASSLQSGVPSRFSGSGSGTDFTLTISSLQPEDFATYYCQQSYSTPPITFG
QGTRLEIKRTVAAPSVFIFPPSDEQLKSGTASVVCLLNNFYPREAKVQWK
VDNALQSGNSQESVTEQDSKDSTYSLSSTLTLSKADYEKHKVYACEVTHQ
GLSSPVTKSFNRGEC(SEQ ID NO: 641)

[0919] Fab Heavy Chain

QVQLVESGGGVVQPGRSLRLSCAASGFTFSSFGMHWVRQAPGKGLEWVIF
ISYDGSDKYYADSVKGRFAISRDSSKNTLYLQMNSLRAEDTAVYYCAKEN
GILTDSYGMDVWGQGTTVTVSSASTKGPSVFPLAPSSKSTSGGTAALGCL
VKDYFPEPVTVSWNSGALTSGVHTFPAVLQSSGLYSLSSVVTVPSSSLGT
QTYICNVNHKPSNTKVDKKVEPKSCDKTH (SEQ ID NO: 642)

### 12834B

[0920] Fab Light Chain

DIQMTQSPSSLSASVGDRVTITCRASQSISSYLNWYQQKPGKAPKLLIYA
ASSLQSGVPSRFSGSGSGTDFTLTISSLQPEDFATYYCQQSYSTPPITFG
QGTRLEIKRTVAAPSVFIFPPSDEQLKSGTASVVCLLNNFYPREAKVQWK
VDNALQSGNSQESVTEQDSKDSTYSLSSTLTLSKADYEKHKVYACEVTHQ
GLSSPVTKSFNRGEC(SEQ ID NO: 643)

[0921] Fab Heavy Chain

QVQLVQSGAEVKKPGASVKVSCKASGYTFTSYGISWVRQAPGQGLEWMGW
ISVYHGNTNYAQKFQGRVTMTTDTSTSTAYMELRSLRSDDTAVYYCAREG
YYDFWSGYYPFDYWGQGTLVTVSSASTKGPSVFPLAPSSKSTSGGTAALG
CLVKDYFPEPVTVSWNSGALTSGVHTFPAVLQSSGLYSLSSVVTVPSSSL
GTQTYICNVNHKPSNTKVDKKVEPKSCDKTH (SEQ ID NO: 644)

### 12835B

[0922] Fab Light Chain

DIQMTQSPSSLSASVGDRVTITCRASQSISSYLNWYQQKPGKAPKLLIYA
ASSLQSGVPSRFSGSGSGTDFTLTISSLQPEDFATYYCQQSYSTPPITFG
QGTRLEIKRTVAAPSVFIFPPSDEQLKSGTASVVCLLNNFYPREAKVQWK
VDNALQSGNSQESVTEQDSKDSTYSLSSTLTLSKADYEKHKVYACEVTHQ
GLSSPVTKSFNRGEC(SEQ ID NO: 645)

[0923] Fab Heavy Chain

EVQLVESGGGLIQPGGSLRLSCEASGFTFRNYEMNWVRQAPGKGLEWVSY
ISSSGNMKDYAESVKGRFTISRDNVKNSLQLQMNSLRVEDTAVYYCARDE
FPYGMDVWGQGTTVTVSSASTKGPSVFPLAPSSKSTSGGTAALGCLVKDY
FPEPVTVSWNSGALTSGVHTFPAVLQSSGLYSLSSVVTVPSSSLGTQTYI
CNVNHKPSNTKVDKKVEPKSCDKTH (SEQ ID NO: 646)

### 12847B (regn17083)

[0924] Fab Light Chain

DIQMTQSPSSLSASVGDRVTITCRASQSISSYLNWYQQKPGKAPKLLIYA
ASSLQSGVPSRFSGSGSGTDFTLTISSLQPEDFATYYCQQSYSTPPITFG
QGTRLEIKRTVAAPSVFIFPPSDEQLKSGTASVVCLLNNFYPREAKVQWK
VDNALQSGNSQESVTEQDSKDSTYSLSSTLTLSKADYEKHKVYACEVTHQ
GLSSPVTKSFNRGEC(SEQ ID NO: 647)

[0925] Fab Heavy Chain

EVQLVESGGGLVQPGRSLRLSCAASGFTFDDYAMNWVRQAPGKGLEWVSG
ISWSSGSMDYADSVKGRFTISRDNAKNSLYLQMNSLRTEDTALYYCAKAR
EVGDYYGMDVWGQGTTVTVSSASTKGPSVFPLAPSSKSTSGGTAALGCLV
KDYFPEPVTVSWNSGALTSGVHTFPAVLQSSGLYSLSSVVTVPSSSLGTQ
TYICNVNHKPSNTKVDKKVEPKSCDKTH (SEQ ID NO: 648); or

EVQLVESGGGLVQPGRSLRLSCAASGFTFDDYAMNWVRQAPGKGLEWVSG
ISWSSGSMDYADSVKGRFTISRDNAKNSLYLQMNSLRTEDTALYYCAKAR
EVGDYYGMDVWGQGTTVTVSSASTKGPSVFPLAPCSRSTSESTAALGCLV
KDYFPEPVTVSWNSGALTSGVHTFPAVLQSSGLYSLSSVVTVPSSSLGTK
TYTCNVDHKPSNTKVDKRVESKYGPPLLQGSG(SEQ ID NO: 669)

### 12848B

[0926] Fab Light Chain

EIVLTQSPGTLSLSPGERATLSCRASQSVSSSYLAWYQQKPGQAPRLLIY
GASSRATGIPDRFSGSGSGTDFTLTISRLEPEDFAVYYCQQYGSSPWTFG
QGTKVEIKRTVAAPSVFIFPPSDEQLKSGTASVVCLLNNFYPREAKVQWK
VDNALQSGNSQESVTEQDSKDSTYSLSSTLTLSKADYEKHKVYACEVTHQ
GLSSPVTKSFNRGEC(SEQ ID NO: 649)

[0927] Fab Heavy Chain

EVQLVESGGGLVQPGRSLTLSCAASGFTFDNFGMHWVRQGPGKGLEWVSG
LTWNSGVIGYADSVKGRFTISRDNAKNSLYLQMNSLRPEDTALYYCAKDI
RNYGPFDYWGQGTLVTVSSASTKGPSVFPLAPSSKSTSGGTAALGCLVKD
YFPEPVTVSWNSGALTSGVHTFPAVLQSSGLYSLSSVVTVPSSSLGTQTY
ICNVNHKPSNTKVDKKVEPKSCDKTH (SEQ ID NO: 650)

### 12843B (regn17081)

[0928] Fab Light Chain

DIQMTQSPSSLSASVGDRVTITCRASQSISSYLNWYQQKPGKAPKLLIYA
ASSLQSGVPSRFSGSGSGTDFTLTISSLQPEDFATYYCQQSYSTPPITFG
QGTRLEIKRTVAAPSVFIFPPSDEQLKSGTASVVCLLNNFYPREAKVQWK
VDNALQSGNSQESVTEQDSKDSTYSLSSTLTLSKADYEKHKVYACEVTHQ
GLSSPVTKSFNRGEC(SEQ ID NO: 651)

[0929] Fab Heavy Chain

EVQLVESGGGLVQPGGSLRLSCAASGFTFNIFEMNWVRQAPGKGLEWISY
ISSRGTTTYYADSVRGRFTISRDNAKNSLYLQMNSLRAEDTAVYYCARDY
EATIPFDFWGQGTLVTVSSASTKGPSVFPLAPSSKSTSGGTAALGCLVKD
YFPEPVTVSWNSGALTSGVHTFPAVLQSSGLYSLSSVVTVPSSSLGTQTY
ICNVNHKPSNTKVDKKVEPKSCDKTH (SEQ ID NO: 652); or

EVQLVESGGGLVQPGGSLRLSCAASGFTFNIFEMNWVRQAPGKGLEWISY
ISSRGTTTYYADSVRGRFTISRDNAKNSLYLQMNSLRAEDTAVYYCARDY
EATIPFDFWGQGTLVTVSSASTKGPSVFPLAPCSRSTSESTAALGCLVKD
YFPEPVTVSWNSGALTSGVHTFPAVLQSSGLYSLSSVVTVPSSSLGTKTY
TCNVDHKPSNTKVDKRVESKYGPPLLQGSG(SEQ ID NO: 670)

### 12844B

[0930] Fab Light Chain

DIQMTQSPSSLSASVGDRVTITCRASQSISSYLNWYQQKPGKAPKLLIYA
ASSLQSGVPSRFSGSGSGTDFTLTISSLQPEDFATYYCQQSYSTPPITFG
QGTRLEIKRTVAAPSVFIFPPSDEQLKSGTASVVCLLNNFYPREAKVQWK
VDNALQSGNSQESVTEQDSKDSTYSLSSTLTLSKADYEKHKVYACEVTHQ
GLSSPVTKSFNRGEC(SEQ ID NO: 653)

[0931] Fab Heavy Chain

EVQLVESGGSVVRPGGSLRLSCEASGFTFDDYGMSWVRQDPGKGLEWVSG
INWNGDRTNYADSVKGRFIISRDNAKNSVYLQMNSLRAEDSALYHCARDQ
GLGVAATLDYWGQGTLVTVSSASTKGPSVFPLAPSSKSTSGGTAALGCLV
KDYFPEPVTVSWNSGALTSGVHTFPAVLQSSGLYSLSSVVTVPSSSLGTQ
TYICNVNHKPSNTKVDKKVEPKSCDKTH (SEQ ID NO: 654)

### 12845B (regn17082)

[0932] Fab Light Chain

DIQMTQSPSSLSASVGDRVTITCRASQSISSYLNWYQQKPGKAPKLLIYA
ASSLQSGVPSRFSGSGSGTDFTLTISSLQPEDFATYYCQQSYSTPPITFG
QGTRLEIKRTVAAPSVFIFPPSDEQLKSGTASVVCLLNNFYPREAKVQWK
VDNALQSGNSQESVTEQDSKDSTYSLSSTLTLSKADYEKHKVYACEVTHQ
GLSSPVTKSFNRGEC(SEQ ID NO: 655)

[0933] Fab Heavy Chain

EVQLVESGGGLVQPGGSLRLSCAASGFTVSNYEMNWVRQAPGKGLEWVSY
ISSSTSNIYYADSVKGRFTISRDNAENSLYLQMNSLRVEDTAVYYCVRDG
IVVVPVGRGYYYYGLDVWGQGTTVTVSSASTKGPSVFPLAPSSKSTSGGT
AALGCLVKDYFPEPVTVSWNSGALTSGVHTFPAVLQSSGLYSLSSVVTVP
SSSLGTQTYICNVNHKPSNTKVDKKVEPKSCDKTH (SEQ ID NO: 65
6); or

EVQLVESGGGLVQPGGSLRLSCAASGFTVSNYEMNWVRQAPGKGLEWVSY
ISSSTSNIYYADSVKGRFTISRDNAENSLYLQMNSLRVEDTAVYYCVRDG
IVVVPVGRGYYYYGLDVWGQGTTVTVSSASTKGPSVFPLAPCSRSTSEST
AALGCLVKDYFPEPVTVSWNSGALTSGVHTFPAVLQSSGLYSLSSVVTVP
SSSLGTKTYTCNVDHKPSNTKVDKRVESKYGPPLLQGSG(SEQ ID NO:
671)

### 12839B (regn17080)

[0934] Fab Light Chain

DIQMTQSPSSLSASVGDRVTITCRASQSISSYLNWYQQKPGKAPKLLIYA
ASSLQSGVPSRFSGSGSGTDFTLTISSLQPEDFATYYCQQSYSTPPITFG
QGTRLEIKRTVAAPSVFIFPPSDEQLKSGTASVVCLLNNFYPREAKVQWK
VDNALQSGNSQESVTEQDSKDSTYSLSSTLTLSKADYEKHKVYACEVTHQ
GLSSPVTKSFNRGEC(SEQ ID NO: 657)

[0935] Fab Heavy Chain

QVQLVESGGGVVQPGRSLRLSCAASGFPFSNYVMYWVRQAPGKGLEWVAL
IFFDGKKNYHADSVKGRFTITRDNSKNMLYLQMNSLRPEDAAVYYCAKIH
CPNGVCYKGYYGMDVWGQGTTVTVSSASTKGPSVFPLAPSSKSTSGGTAA
LGCLVKDYFPEPVTVSWNSGALTSGVHTFPAVLQSSGLYSLSSVVTVPSS
SLGTQTYICNVNHKPSNTKVDKKVEPKSCDKTH (SEQ ID NO: 658)
; or

QVQLVESGGGVVQPGRSLRLSCAASGFPFSNYVMYWVRQAPGKGLEWVAL
IFFDGKKNYHADSVKGRFTITRDNSKNMLYLQMNSLRPEDAAVYYCAKIH
CPNGVCYKGYYGMDVWGQGTTVTVSSASTKGPSVFPLAPCSRSTSESTAA
LGCLVKDYFPEPVTVSWNSGALTSGVHTFPAVLQSSGLYSLSSVVTVPSS
SLGTKTYTCNVDHKPSNTKVDKRVESKYGPPLLQGSG(SEQ ID NO: 6
72)

### Hih12841b

[0936] Fab Light Chain

DIQMTQSPSSLSASVGDRVTITCRASQSISSYLNWYQQKPGKAPKLLIYA
ASSLQSGVPSRFSGSGSGTDFTLTISSLQPEDFATYYCQQSYSTPPITFG
QGTRLEIKRTVAAPSVFIFPPSDEQLKSGTASVVCLLNNFYPREAKVQWK
VDNALQSGNSQESVTEQDSKDSTYSLSSTLTLSKADYEKHKVYACEVTHQ
GLSSPVTKSFNRGEC(SEQ ID NO: 659)

[0937] Fab Heavy Chain

EVQLVESGGGLVQPGGSLRLSCAASGFTFSNYWMNWVRQAPGKGLEWVAN
IKEDGGKKLYVDSVKGRFTISRDNAKNSLFLQMNSLRAEDTAVYYCARED
TTLVVDYYYYGMDVWGQGTTVTVSSASTKGPSVFPLAPSSKSTSGGTAAL
GCLVKDYFPEPVTVSWNSGALTSGVHTFPAVLQSSGLYSLSSVVTVPSSS
LGTQTYICNVNHKPSNTKVDKKVEPKSCDKTH (SEQ ID NO: 660)

### 12850B

[0938] Fab Light Chain

EIVLTQSPGTLSLSPGERATLSCRASQSVSSSYLAWYQQKPGQAPRLLIY
GASSRATGIPDRFSGSGSGTDFTLTISRLEPEDFAVYYCQQYGSSPWTFG
QGTKVEIKRTVAAPSVFIFPPSDEQLKSGTASVVCLLNNFYPREAKVQWK
VDNALQSGNSQESVTEQDSKDSTYSLSSTLTLSKADYEKHKVYACEVTHQ
GLSSPVTKSFNRGEC(SEQ ID NO: 661)

[0939] Fab Heavy Chain

QVQLVQSGAEVKKPGSSVKVSCKASGGTFNTYAITWVRQAPGQGLEWMGG
IIPISGIAEYAQKFQGRVTITTDDSSTTAYMELNSLRSEDTAVYYCASWN
YALYYFYGMDVWGRGTTVTVSSASTKGPSVFPLAPSSKSTSGGTAALGCL
VKDYFPEPVTVSWNSGALTSGVHTFPAVLQSSGLYSLSSVVTVPSSSLGT
QTYICNVNHKPSNTKVDKKVEPKSCDKTH (SEQ ID NO: 662)

### 69261

[0940] Fab Light Chain

DIVMTQSPLSLPVTPGEPASISCRSSQSLLHSNGYNYLDWYLQKPGQSPQ
FLIYLGSNRASGVPDRFSGSGSGTDFTLKINRVEAEDVGVYYCMQALQTP
YTFGQGTKLEIKRTVAAPSVFIFPPSDEQLKSGTASVVCLLNNFYPREAK
VQWKVDNALQSGNSQESVTEQDSKDSTYSLSSTLTLSKADYEKHKVYACE
VTHQGLSSPVTKSFNRGEC (SEQ ID NO: 663)

[0941] Fab Heavy Chain

QVQLVESGGGLVKPGGSLRLSCAASGFTFSVYYMNWIRQAPGKGLEWVSY
ISSSGSTIYYADSVKGRFTISRDNAKNSLYLQMNSLRAEDTAVYYCGREG
YSGTYSYYGMDVWGQGTTVTVSSASTKGPSVFPLAPSSKSTSGGTAALGC
LVKDYFPEPVTVSWNSGALTSGVHTFPAVLQSSGLYSLSSVVTVPSSSLG
TQTYICNVNHKPSNTKVDKKVEPKSCDKTH (SEQ ID NO: 664)

### 69263

[0942] Fab Light Chain

DIQMTQSPSSLSASVGDRVTITCRASQDISHYSAWYQQKPGKLPNLLIYA
ASTLQSGVPSRFSGSGSGTDFSLTTSSLQPEDVATYYCQKYNSVPLTFGG
GTKVEIKRTVAAPSVFIFPPSDEQLKSGTASVVCLLNNFYPREAKVQWKV
DNALQSGNSQESVTEQDSKDSTYSLSSTLTLSKADYEKHKVYACEVTHQG
LSSPVTKSFNRGEC(SEQ ID NO: 665)

[0943] Fab Heavy Chain

EVQLVESGGGLVQPGRSLRLSCAVSGFTFDDYAMHWVRQAPGKGLEWVSG
ISWNSGTRGYADSVKGRFTISRDNAKNSLYLQMNSLRGEDTALYYCVKDI
TISPNYYGMDVWGQGTTVTVSSASTKGPSVFPLAPSSKSTSGGTAALGCL
VKDYFPEPVTVSWNSGALTSGVHTFPAVLQSSGLYSLSSVVTVPSSSLGT
QTYICNVNHKPSNTKVDKKVEPKSCDKTH (SEQ ID NO: 666)

### Anti-TfR scFVGAA Sequences

[0944] 12795B

DIQMTQSPSSLSASVGDRVTITCRASQGIRDHFGWYQQKPGKAPKRLIYA
ASSLHSGVPSRFSGSGSGTEFTLTISSLQPEDFATYYCLQYDTYPLTFGG
GTKVEIKGGGGSGGGGSGGGGSEVQLVESGGGLVQPGGSLRLSCATSGFT
FTSYDMKWVRQAPGLGLEWVSAISGSGGNTYYADSVKGRFTISRDNSRNT
LYLQMNSLRAEDTAVYYCTRSHDFGAFDYFDYWGQGTLVTVSSGGGGSGG
GGSAHPGRPRAVPTQCDVPPNSRFDCAPDKAITQEQCEARGCCYIPAKQG
LQGAQMGQPWCFFPPSYPSYKLENLSSSEMGYTATLTRTTPTFFPKDILT
LRLDVMMETENRLHFTIKDPANRRYEVPLETPHVHSRAPSPLYSVEFSEE
PFGVIVRRQLDGRVLLNTTVAPLFFADQFLQLSTSLPSQYITGLAEHLSP
LMLSTSWTRITLWNRDLAPTPGANLYGSHPFYLALEDGGSAHGVFLLNSN
AMDVVLQPSPALSWRSTGGILDVYIFLGPEPKSVVQQYLDVVGYPFMPPY
WGLGFHLCRWGYSSTAITRQVVENMTRAHFPLDVQWNDLDYMDSRRDFTF
NKDGFRDFPAMVQELHQGGRRYMMIVDPAISSSGPAGSYRPYDEGLRRGV
FITNETGQPLIGKVWPGSTAFPDFTNPTALAWWEDMVAEFHDQVPFDGMW
IDMNEPSNFIRGSEDGCPNNELENPPYVPGVVGGTLQAATICASSHQFLS
THYNLHNLYGLTEAIASHRALVKARGTRPFVISRSTFAGHGRYAGHWTGD
VWSSWEQLASSVPEILQFNLLGVPLVGADVCGFLGNTSEELCVRWTQLGA
FYPFMRNHNSLLSLPQEPYSFSEPAQQAMRKALTLRYALLPHLYTLFHQA
HVAGETVARPLFLEFPKDSSTWTVDHQLLWGEALLITPVLQAGKAEVTGY
FPLGTWYDLQTVPVEALGSLPPPPAAPREPAIHSEGQWVTLPAPLDTINV
HLRAGYIIPLQGPGLTTTESRQQPMALAVALTKGGEARGELFWDDGESLE
VLERGAYTQVIFLARNNTIVNELVRVTSEGAGLQLQKVTVLGVATAPQQV
LSNGVPVSNFTYSPDTKVLDICVSLLMGEQFLVSWC(SEQ ID NO: 67
5)

[0945] 12798B (REGN16818)

EIVMTQSPATLSVSPGERATLSCRASQTVSSNLAWYQQKPGQAPRLLIYG
SSSRATGIPARFSGSGSGTEFTLTISSLQSEDFAVYYCQQYNNWPPYTFG
QGTKLEIKGGGGSGGGGSGGGGSEVQLVESGGDLVQPGRSLRLSCAASGF
TFDDYAMHWVRQAPGKGLEWVSGISWNSATRVYADSVKGRFTISRDNAKN
FLYLQMNSLRSEDTALYHCAKDMDISLGYYGLDVWGQGTTVTVSSGGGGS
GGGGSAHPGRPRAVPTQCDVPPNSRFDCAPDKAITQEQCEARGCCYIPAK
QGLQGAQMGQPWCFFPPSYPSYKLENLSSSEMGYTATLTRTTPTFFPKDI
LTLRLDVMMETENRLHFTIKDPANRRYEVPLETPHVHSRAPSPLYSVEFS
EEPFGVIVRRQLDGRVLLNTTVAPLFFADQFLQLSTSLPSQYITGLAEHL
SPLMLSTSWTRITLWNRDLAPTPGANLYGSHPFYLALEDGGSAHGVFLLN
SNAMDVVLQPSPALSWRSTGGILDVYIFLGPEPKSVVQQYLDVVGYPFMP
PYWGLGFHLCRWGYSSTAITRQVVENMTRAHFPLDVQWNDLDYMDSRRDF
TFNKDGFRDFPAMVQELHQGGRRYMMIVDPAISSSGPAGSYRPYDEGLRR
GVFITNETGQPLIGKVWPGSTAFPDFTNPTALAWWEDMVAEFHDQVPFDG
MWIDMNEPSNFIRGSEDGCPNNELENPPYVPGVVGGTLQAATICASSHQF
LSTHYNLHNLYGLTEAIASHRALVKARGTRPFVISRSTFAGHGRYAGHWT
GDVWSSWEQLASSVPEILQFNLLGVPLVGADVCGFLGNTSEELCVRWTQL
GAFYPFMRNHNSLLSLPQEPYSFSEPAQQAMRKALTLRYALLPHLYTLFH
QAHVAGETVARPLFLEFPKDSSTWTVDHQLLWGEALLITPVLQAGKAEVT
GYFPLGTWYDLQTVPVEALGSLPPPPAAPREPAIHSEGQWVTLPAPLDTI
NVHLRAGYIIPLQGPGLTTTESRQQPMALAVALTKGGEARGELFWDDGES
LEVLERGAYTQVIFLARNNTIVNELVRVTSEGAGLQLQKVTVLGVATAPQ
QVLSNGVPVSNFTYSPDTKVLDICVSLLMGEQFLVSWC(SEQ ID NO:
676)

[0946] 12799B (REGN16819)

DIQMTQSPSSVSASVGDRVTITCRASQGIASWLAWYQQKPGKAPELLIYA
ASSLQGGVPSRFSGSGSGTDFTLTISSLQPEDFAIYYCQQANYFPWTFGQ
GTKVEIKGGGGSGGGGSGGGGSQITLKESGPTLVKPTQTLTLTCTFSGFS
LSTSGVGVVWIRQPPGKALEWLALIYWNDHKRYSPSLGSRLTITKDTSKN
QVVLTMTNMDPVDTATYYCAHYSGSYSYYYYGLDVWGQGTTVTVSSGGGG
SGGGGSAHPGRPRAVPTQCDVPPNSRFDCAPDKAITQEQCEARGCCYIPA
KQGLQGAQMGQPWCFFPPSYPSYKLENLSSSEMGYTATLTRTTPTFFPKD
ILTLRLDVMMETENRLHFTIKDPANRRYEVPLETPHVHSRAPSPLYSVEF
SEEPFGVIVRRQLDGRVLLNTTVAPLFFADQFLQLSTSLPSQYITGLAEH
LSPLMLSTSWTRITLWNRDLAPTPGANLYGSHPFYLALEDGGSAHGVFLL
NSNAMDVVLQPSPALSWRSTGGILDVYIFLGPEPKSVVQQYLDVVGYPFM
PPYWGLGFHLCRWGYSSTAITRQVVENMTRAHFPLDVQWNDLDYMDSRRD
FTFNKDGFRDFPAMVQELHQGGRRYMMIVDPAISSSGPAGSYRPYDEGLR
RGVFITNETGQPLIGKVWPGSTAFPDFTNPTALAWWEDMVAEFHDQVPFD
GMWIDMNEPSNFIRGSEDGCPNNELENPPYVPGVVGGTLQAATICASSHQ
FLSTHYNLHNLYGLTEAIASHRALVKARGTRPFVISRSTFAGHGRYAGHW
TGDVWSSWEQLASSVPEILQFNLLGVPLVGADVCGFLGNTSEELCVRWTQ
LGAFYPFMRNHNSLLSLPQEPYSFSEPAQQAMRKALTLRYALLPHLYTLF
HQAHVAGETVARPLFLEFPKDSSTWTVDHQLLWGEALLITPVLQAGKAEV
TGYFPLGTWYDLQTVPVEALGSLPPPPAAPREPAIHSEGQWVTLPAPLDT
INVHLRAGYIIPLQGPGLTTTESRQQPMALAVALTKGGEARGELFWDDGE
SLEVLERGAYTQVIFLARNNTIVNELVRVTSEGAGLQLQKVTVLGVATAP
QQVLSNGVPVSNFTYSPDTKVLDICVSLLMGEQFLVSWC(SEQ ID NO:
570)

[0947] 12801B

DIQMTQSPSSLSASVGDRVTITCRASQGIRTDLGWYQQKPGKAPKRLIYA
ASSLQSGVPSRFSGSGSGTEFTLTISSLRPEDFATFYCLQYNSYPLTFGG
GTKVEIKGGGGSGGGGSGGGGSEVQLLESGGALVQPGGSLRLSCAASGFT
FTSYAMHWVRQAPGKGLEWVSSIRGSGGGTYSADSVKGRFTISRDNSRDT
LYLQMNSVRAEDTAVYYCARSHDYGAFDFFDYWGQGTLVTVSSGGGGSGG
GGSAHPGRPRAVPTQCDVPPNSRFDCAPDKAITQEQCEARGCCYIPAKQG
LQGAQMGQPWCFFPPSYPSYKLENLSSSEMGYTATLTRTTPTFFPKDILT
LRLDVMMETENRLHFTIKDPANRRYEVPLETPHVHSRAPSPLYSVEFSEE
PFGVIVRRQLDGRVLLNTTVAPLFFADQFLQLSTSLPSQYITGLAEHLSP
LMLSTSWTRITLWNRDLAPTPGANLYGSHPFYLALEDGGSAHGVFLLNSN
AMDVVLQPSPALSWRSTGGILDVYIFLGPEPKSVVQQYLDVVGYPFMPPY
WGLGFHLCRWGYSSTAITRQVVENMTRAHFPLDVQWNDLDYMDSRRDFTF
NKDGFRDFPAMVQELHQGGRRYMMIVDPAISSSGPAGSYRPYDEGLRRGV
FITNETGQPLIGKVWPGSTAFPDFTNPTALAWWEDMVAEFHDQVPFDGMW
IDMNEPSNFIRGSEDGCPNNELENPPYVPGVVGGTLQAATICASSHQFLS
THYNLHNLYGLTEAIASHRALVKARGTRPFVISRSTFAGHGRYAGHWTGD
VWSSWEQLASSVPEILQFNLLGVPLVGADVCGFLGNTSEELCVRWTQLGA
FYPFMRNHNSLLSLPQEPYSFSEPAQQAMRKALTLRYALLPHLYTLFHQA
HVAGETVARPLFLEFPKDSSTWTVDHQLLWGEALLITPVLQAGKAEVTGY
FPLGTWYDLQTVPVEALGSLPPPPAAPREPAIHSEGQWVTLPAPLDTINV
HLRAGYIIPLQGPGLTTTESRQQPMALAVALTKGGEARGELFWDDGESLE
VLERGAYTQVIFLARNNTIVNELVRVTSEGAGLQLQKVTVLGVATAPQQV
LSNGVPVSNFTYSPDTKVLDICVSLLMGEQFLVSWC(SEQ ID NO: 67
7)

[0948] 12802B (REGN16820)

EIVMTQSPATLSVSPGERATLSCRASQSVSINLAWYQQKPGQAPRLLIFV
ASTRATGIPARFSGSGSGTEFTLTISSLQSEDFATYYCQQYDIWPYTFGQ
GTKLEIKGGGGSGGGGSGGGGSQVQLVESGGGLVKPGGSLRLSCAASGFT
FSDYFMSWIRQAPGKGLEWVSYISSTGSTINYADSVKGRFTISRDNVKNS
LYLQMTSLRVEDTAVYYCTRDNWNYEYWGQGTLVTVSSGGGGSGGGGSAH
PGRPRAVPTQCDVPPNSRFDCAPDKAITQEQCEARGCCYIPAKQGLQGAQ
MGQPWCFFPPSYPSYKLENLSSSEMGYTATLTRTTPTFFPKDILTLRLDV
MMETENRLHFTIKDPANRRYEVPLETPHVHSRAPSPLYSVEFSEEPFGVI
VRRQLDGRVLLNTTVAPLFFADQFLQLSTSLPSQYITGLAEHLSPLMLST
SWTRITLWNRDLAPTPGANLYGSHPFYLALEDGGSAHGVFLLNSNAMDVV
LQPSPALSWRSTGGILDVYIFLGPEPKSVVQQYLDVVGYPFMPPYWGLGF
HLCRWGYSSTAITRQVVENMTRAHFPLDVQWNDLDYMDSRRDFTFNKDGF
RDFPAMVQELHQGGRRYMMIVDPAISSSGPAGSYRPYDEGLRRGVFITNE
TGQPLIGKVWPGSTAFPDFTNPTALAWWEDMVAEFHDQVPFDGMWIDMNE
PSNFIRGSEDGCPNNELENPPYVPGVVGGTLQAATICASSHQFLSTHYNL
HNLYGLTEAIASHRALVKARGTRPFVISRSTFAGHGRYAGHWTGDVWSSW
EQLASSVPEILQFNLLGVPLVGADVCGFLGNTSEELCVRWTQLGAFYPFM
RNHNSLLSLPQEPYSFSEPAQQAMRKALTLRYALLPHLYTLFHQAHVAGE
TVARPLFLEFPKDSSTWTVDHQLLWGEALLITPVLQAGKAEVTGYFPLGT
WYDLQTVPVEALGSLPPPPAAPREPAIHSEGQWVTLPAPLDTINVHLRAG
YIIPLQGPGLTTTESRQQPMALAVALTKGGEARGELFWDDGESLEVLERG
AYTQVIFLARNNTIVNELVRVTSEGAGLQLQKVTVLGVATAPQQVLSNGV
PVSNFTYSPDTKVLDICVSLLMGEQFLVSWC(SEQ ID NO: 678)

[0949] 12808B

DIQMTQSPSSLSASVGDRVTINCRASQGIRNDLGWYQQKPGKAPKRLIYA
ASSLQSGVPLRFSGSGSGTEFTLTINNLQPEDFATYYCLSHNSYPWTFGQ
GTKVEIKGGGGSGGGGSGGGGSQLQLQESGPGLVKPSETLSLTCTVSGES
ISSNTYYWGWIRQPPGKGLEWIGSIDYSGTTNYNPSLKSRVTISVDTSRN
HFSLRLRSVTAADTAVYYCAREWGNYGYYYGMDVWGQGTTVTVSSGGGGS
GGGGSAHPGRPRAVPTQCDVPPNSRFDCAPDKAITQEQCEARGCCYIPAK
QGLQGAQMGQPWCFFPPSYPSYKLENLSSSEMGYTATLTRTTPTFFPKDI
LTLRLDVMMETENRLHFTIKDPANRRYEVPLETPHVHSRAPSPLYSVEFS
EEPFGVIVRRQLDGRVLLNTTVAPLFFADQFLQLSTSLPSQYITGLAEHL
SPLMLSTSWTRITLWNRDLAPTPGANLYGSHPFYLALEDGGSAHGVFLLN
SNAMDVVLQPSPALSWRSTGGILDVYIFLGPEPKSVVQQYLDVVGYPFMP
PYWGLGFHLCRWGYSSTAITRQVVENMTRAHFPLDVQWNDLDYMDSRRDF
TFNKDGFRDFPAMVQELHQGGRRYMMIVDPAISSSGPAGSYRPYDEGLRR
GVFITNETGQPLIGKVWPGSTAFPDFTNPTALAWWEDMVAEFHDQVPFDG
MWIDMNEPSNFIRGSEDGCPNNELENPPYVPGVVGGTLQAATICASSHQF
LSTHYNLHNLYGLTEAIASHRALVKARGTRPFVISRSTFAGHGRYAGHWT
GDVWSSWEQLASSVPEILQFNLLGVPLVGADVCGFLGNTSEELCVRWTQL
GAFYPFMRNHNSLLSLPQEPYSFSEPAQQAMRKALTLRYALLPHLYTLFH
QAHVAGETVARPLFLEFPKDSSTWTVDHQLLWGEALLITPVLQAGKAEVT
GYFPLGTWYDLQTVPVEALGSLPPPPAAPREPAIHSEGQWVTLPAPLDTI
NVHLRAGYIIPLQGPGLTTTESRQQPMALAVALTKGGEARGELFWDDGES
LEVLERGAYTQVIFLARNNTIVNELVRVTSEGAGLQLQKVTVLGVATAPQ
QVLSNGVPVSNFTYSPDTKVLDICVSLLMGEQFLVSWC(SEQ ID NO:
679)

[0950] 12812B (REGN16821)

DIQMTQSPPSVSASVGDRVTITCRASQGISSWLAWYQQKPGKAPKLLIYA
ASSLQSGVPSRFSGSGSGTDFTLTISSLQPEDFATYYCQQANSFPRTFGQ
GTKVEIKGGGGSGGGGSGGGGSQVQLVQSGAEVKKPGSSVRVSCKASRGT
FSSYAISWVRQAPGQGLEWMGGIIPIFGTANYAQKFLARVTITADESTST
AYMELSSLRSEDTAVYYCAREKGWNYFDYWGQGTLVTVSSGGGGSGGGGS
AHPGRPRAVPTQCDVPPNSRFDCAPDKAITQEQCEARGCCYIPAKQGLQG
AQMGQPWCFFPPSYPSYKLENLSSSEMGYTATLTRTTPTFFPKDILTLRL
DVMMETENRLHFTIKDPANRRYEVPLETPHVHSRAPSPLYSVEFSEEPFG
VIVRRQLDGRVLLNTTVAPLFFADQFLQLSTSLPSQYITGLAEHLSPLML
STSWTRITLWNRDLAPTPGANLYGSHPFYLALEDGGSAHGVFLLNSNAMD
VVLQPSPALSWRSTGGILDVYIFLGPEPKSVVQQYLDVVGYPFMPPYWGL
GFHLCRWGYSSTAITRQVVENMTRAHFPLDVQWNDLDYMDSRRDFTFNKD
GFRDFPAMVQELHQGGRRYMMIVDPAISSSGPAGSYRPYDEGLRRGVFIT
NETGQPLIGKVWPGSTAFPDFTNPTALAWWEDMVAEFHDQVPFDGMWIDM
NEPSNFIRGSEDGCPNNELENPPYVPGVVGGTLQAATICASSHQFLSTHY
NLHNLYGLTEAIASHRALVKARGTRPFVISRSTFAGHGRYAGHWTGDVWS
SWEQLASSVPEILQFNLLGVPLVGADVCGFLGNTSEELCVRWTQLGAFYP
FMRNHNSLLSLPQEPYSFSEPAQQAMRKALTLRYALLPHLYTLFHQAHVA
GETVARPLFLEFPKDSSTWTVDHQLLWGEALLITPVLQAGKAEVTGYFPL
GTWYDLQTVPVEALGSLPPPPAAPREPAIHSEGQWVTLPAPLDTINVHLR
AGYIIPLQGPGLTTTESRQQPMALAVALTKGGEARGELFWDDGESLEVLE
RGAYTQVIFLARNNTIVNELVRVTSEGAGLQLQKVTVLGVATAPQQVLSN
GVPVSNFTYSPDTKVLDICVSLLMGEQFLVSWC(SEQ ID NO: 680)

[0951] 12816B

DIVMTQSPLSLPVTPGEPASISCRSSQSLLHGNGYNYLTWYLQKPGQSPQ
LLIYLGSNRASGVPDRFSGSGSGTDFTLKISRVEAEDVGVYYCMQALQTP
YTFGQGTKLEIKGGGGSGGGGSGGGGSQVQLVESGGGLVKPGGSLRLSCA
ASGFTFSDYYMNWIRQAPGKGLEWVSYISSSGTTIYYADSVKGRFTISRD
NAKKSLYLEMNSLRAEDTAVYYCAREGYGNDYYYYGIDVWGQGTTVTVSS
GGGGSGGGGSAHPGRPRAVPTQCDVPPNSRFDCAPDKAITQEQCEARGCC
YIPAKQGLQGAQMGQPWCFFPPSYPSYKLENLSSSEMGYTATLTRTTPTF
FPKDILTLRLDVMMETENRLHFTIKDPANRRYEVPLETPHVHSRAPSPLY
SVEFSEEPFGVIVRRQLDGRVLLNTTVAPLFFADQFLQLSTSLPSQYITG
LAEHLSPLMLSTSWTRITLWNRDLAPTPGANLYGSHPFYLALEDGGSAHG
VFLLNSNAMDVVLQPSPALSWRSTGGILDVYIFLGPEPKSVVQQYLDVVG
YPFMPPYWGLGFHLCRWGYSSTAITRQVVENMTRAHFPLDVQWNDLDYMD
SRRDFTFNKDGFRDFPAMVQELHQGGRRYMMIVDPAISSSGPAGSYRPYD
EGLRRGVFITNETGQPLIGKVWPGSTAFPDFTNPTALAWWEDMVAEFHDQ
VPFDGMWIDMNEPSNFIRGSEDGCPNNELENPPYVPGVVGGTLQAATICA
SSHQFLSTHYNLHNLYGLTEAIASHRALVKARGTRPFVISRSTFAGHGRY
AGHWTGDVWSSWEQLASSVPEILQFNLLGVPLVGADVCGFLGNTSEELCV
RWTQLGAFYPFMRNHNSLLSLPQEPYSFSEPAQQAMRKALTLRYALLPHL
YTLFHQAHVAGETVARPLFLEFPKDSSTWTVDHQLLWGEALLITPVLQAG
KAEVTGYFPLGTWYDLQTVPVEALGSLPPPPAAPREPAIHSEGQWVTLPA
PLDTINVHLRAGYIIPLQGPGLTTTESRQQPMALAVALTKGGEARGELFW
DDGESLEVLERGAYTQVIFLARNNTIVNELVRVTSEGAGLQLQKVTVLGV
ATAPQQVLSNGVPVSNFTYSPDTKVLDICVSLLMGEQFLVSWC(SEQ ID
NO: 681)

[0952] 12833B

DIQMTQSPSSLSASVGDRVTITCRASQSISSYLNWYQQKPGKAPKLLIYA
ASSLQSGVPSRFSGSGSGTDFTLTISSLQPEDFATYYCQQSYSTPPITFG
QGTRLEIKGGGGSGGGGSGGGGSQVQLVESGGGVVQPGRSLRLSCAASGF
TFSSFGMHWVRQAPGKGLEWVIFISYDGSDKYYADSVKGRFAISRDSSKN
TLYLQMNSLRAEDTAVYYCAKENGILTDSYGMDVWGQGTTVTVSSGGGGS
GGGGSAHPGRPRAVPTQCDVPPNSRFDCAPDKAITQEQCEARGCCYIPAK
QGLQGAQMGQPWCFFPPSYPSYKLENLSSSEMGYTATLTRTTPTFFPKDI
LTLRLDVMMETENRLHFTIKDPANRRYEVPLETPHVHSRAPSPLYSVEFS
EEPFGVIVRRQLDGRVLLNTTVAPLFFADQFLQLSTSLPSQYITGLAEHL
SPLMLSTSWTRITLWNRDLAPTPGANLYGSHPFYLALEDGGSAHGVFLLN
SNAMDVVLQPSPALSWRSTGGILDVYIFLGPEPKSVVQQYLDVVGYPFMP
PYWGLGFHLCRWGYSSTAITRQVVENMTRAHFPLDVQWNDLDYMDSRRDF
TFNKDGFRDFPAMVQELHQGGRRYMMIVDPAISSSGPAGSYRPYDEGLRR
GVFITNETGQPLIGKVWPGSTAFPDFTNPTALAWWEDMVAEFHDQVPFDG
MWIDMNEPSNFIRGSEDGCPNNELENPPYVPGVVGGTLQAATICASSHQF
LSTHYNLHNLYGLTEAIASHRALVKARGTRPFVISRSTFAGHGRYAGHWT
GDVWSSWEQLASSVPEILQFNLLGVPLVGADVCGFLGNTSEELCVRWTQL
GAFYPFMRNHNSLLSLPQEPYSFSEPAQQAMRKALTLRYALLPHLYTLFH
QAHVAGETVARPLFLEFPKDSSTWTVDHQLLWGEALLITPVLQAGKAEVT
GYFPLGTWYDLQTVPVEALGSLPPPPAAPREPAIHSEGQWVTLPAPLDTI
NVHLRAGYIIPLQGPGLTTTESRQQPMALAVALTKGGEARGELFWDDGES
LEVLERGAYTQVIFLARNNTIVNELVRVTSEGAGLQLQKVTVLGVATAPQ
QVLSNGVPVSNFTYSPDTKVLDICVSLLMGEQFLVSWC(SEQ ID NO:
682)

[0953] 12834B

DIQMTQSPSSLSASVGDRVTITCRASQSISSYLNWYQQKPGKAPKLLIYA
ASSLQSGVPSRFSGSGSGTDFTLTISSLQPEDFATYYCQQSYSTPPITFG
QGTRLEIKGGGGSGGGGSGGGGSQVQLVQSGAEVKKPGASVKVSCKASGY
TFTSYGISWVRQAPGQGLEWMGWISVYHGNTNYAQKFQGRVTMTTDTSTS
TAYMELRSLRSDDTAVYYCAREGYYDFWSGYYPFDYWGQGTLVTVSSGGG
GSGGGGSAHPGRPRAVPTQCDVPPNSRFDCAPDKAITQEQCEARGCCYIP
AKQGLQGAQMGQPWCFFPPSYPSYKLENLSSSEMGYTATLTRTTPTFFPK
DILTLRLDVMMETENRLHFTIKDPANRRYEVPLETPHVHSRAPSPLYSVE
FSEEPFGVIVRRQLDGRVLLNTTVAPLFFADQFLQLSTSLPSQYITGLAE
HLSPLMLSTSWTRITLWNRDLAPTPGANLYGSHPFYLALEDGGSAHGVFL
LNSNAMDVVLQPSPALSWRSTGGILDVYIFLGPEPKSVVQQYLDVVGYPF
MPPYWGLGFHLCRWGYSSTAITRQVVENMTRAHFPLDVQWNDLDYMDSRR
DFTFNKDGFRDFPAMVQELHQGGRRYMMIVDPAISSSGPAGSYRPYDEGL
RRGVFITNETGQPLIGKVWPGSTAFPDFTNPTALAWWEDMVAEFHDQVPF
DGMWIDMNEPSNFIRGSEDGCPNNELENPPYVPGVVGGTLQAATICASSH
QFLSTHYNLHNLYGLTEAIASHRALVKARGTRPFVISRSTFAGHGRYAGH
WTGDVWSSWEQLASSVPEILQFNLLGVPLVGADVCGFLGNTSEELCVRWT
QLGAFYPFMRNHNSLLSLPQEPYSFSEPAQQAMRKALTLRYALLPHLYTL
FHQAHVAGETVARPLFLEFPKDSSTWTVDHQLLWGEALLITPVLQAGKAE
VTGYFPLGTWYDLQTVPVEALGSLPPPPAAPREPAIHSEGQWVTLPAPLD
TINVHLRAGYIIPLQGPGLTTTESRQQPMALAVALTKGGEARGELFWDDG
ESLEVLERGAYTQVIFLARNNTIVNELVRVTSEGAGLQLQKVTVLGVATA
PQQVLSNGVPVSNFTYSPDTKVLDICVSLLMGEQFLVSWC(SEQ ID NO
: 683)

[0954] 12835B

DIQMTQSPSSLSASVGDRVTITCRASQSISSYLNWYQQKPGKAPKLLIYA
ASSLQSGVPSRFSGSGSGTDFTLTISSLQPEDFATYYCQQSYSTPPITFG
QGTRLEIKGGGGSGGGGSGGGGSEVQLVESGGGLIQPGGSLRLSCEASGF
TFRNYEMNWVRQAPGKGLEWVSYISSSGNMKDYAESVKGRFTISRDNVKN
SLQLQMNSLRVEDTAVYYCARDEFPYGMDVWGQGTTVTVSSGGGGSGGGG
SAHPGRPRAVPTQCDVPPNSRFDCAPDKAITQEQCEARGCCYIPAKQGLQ
GAQMGQPWCFFPPSYPSYKLENLSSSEMGYTATLTRTTPTFFPKDILTLR
LDVMMETENRLHFTIKDPANRRYEVPLETPHVHSRAPSPLYSVEFSEEPF
GVIVRRQLDGRVLLNTTVAPLFFADQFLQLSTSLPSQYITGLAEHLSPLM
LSTSWTRITLWNRDLAPTPGANLYGSHPFYLALEDGGSAHGVFLLNSNAM
DVVLQPSPALSWRSTGGILDVYIFLGPEPKSVVQQYLDVVGYPFMPPYWG
LGFHLCRWGYSSTAITRQVVENMTRAHFPLDVQWNDLDYMDSRRDFTFNK
DGFRDFPAMVQELHQGGRRYMMIVDPAISSSGPAGSYRPYDEGLRRGVFI
TNETGQPLIGKVWPGSTAFPDFTNPTALAWWEDMVAEFHDQVPFDGMWID
MNEPSNFIRGSEDGCPNNELENPPYVPGVVGGTLQAATICASSHQFLSTH
YNLHNLYGLTEAIASHRALVKARGTRPFVISRSTFAGHGRYAGHWTGDVW
SSWEQLASSVPEILQFNLLGVPLVGADVCGFLGNTSEELCVRWTQLGAFY
PFMRNHNSLLSLPQEPYSFSEPAQQAMRKALTLRYALLPHLYTLFHQAHV
AGETVARPLFLEFPKDSSTWTVDHQLLWGEALLITPVLQAGKAEVTGYFP
LGTWYDLQTVPVEALGSLPPPPAAPREPAIHSEGQWVTLPAPLDTINVHL
RAGYIIPLQGPGLTTTESRQQPMALAVALTKGGEARGELFWDDGESLEVL
ERGAYTQVIFLARNNTIVNELVRVTSEGAGLQLQKVTVLGVATAPQQVLS
NGVPVSNFTYSPDTKVLDICVSLLMGEQFLVSWC(SEQ ID NO: 684)

[0955] 12839B (REGN16822)

DIQMTQSPSSLSASVGDRVTITCRASQSISSYLNWYQQKPGKAPKLLIYA
ASSLQSGVPSRFSGSGSGTDFTLTISSLQPEDFATYYCQQSYSTPPITFG
QGTRLEIKGGGGSGGGGSGGGGSQVQLVESGGGVVQPGRSLRLSCAASGF
PFSNYVMYWVRQAPGKGLEWVALIFFDGKKNYHADSVKGRFTITRDNSKN
MLYLQMNSLRPEDAAVYYCAKIHCPNGVCYKGYYGMDVWGQGTTVTVSSG
GGGSGGGGSAHPGRPRAVPTQCDVPPNSRFDCAPDKAITQEQCEARGCCY
IPAKQGLQGAQMGQPWCFFPPSYPSYKLENLSSSEMGYTATLTRTTPTFF
PKDILTLRLDVMMETENRLHFTIKDPANRRYEVPLETPHVHSRAPSPLYS
VEFSEEPFGVIVRRQLDGRVLLNTTVAPLFFADQFLQLSTSLPSQYITGL
AEHLSPLMLSTSWTRITLWNRDLAPTPGANLYGSHPFYLALEDGGSAHGV
FLLNSNAMDVVLQPSPALSWRSTGGILDVYIFLGPEPKSVVQQYLDVVGY
PFMPPYWGLGFHLCRWGYSSTAITRQVVENMTRAHFPLDVQWNDLDYMDS
RRDFTFNKDGFRDFPAMVQELHQGGRRYMMIVDPAISSSGPAGSYRPYDE
GLRRGVFITNETGQPLIGKVWPGSTAFPDFTNPTALAWWEDMVAEFHDQV
PFDGMWIDMNEPSNFIRGSEDGCPNNELENPPYVPGVVGGTLQAATICAS
SHQFLSTHYNLHNLYGLTEAIASHRALVKARGTRPFVISRSTFAGHGRYA
GHWTGDVWSSWEQLASSVPEILQFNLLGVPLVGADVCGFLGNTSEELCVR
WTQLGAFYPFMRNHNSLLSLPQEPYSFSEPAQQAMRKALTLRYALLPHLY
TLFHQAHVAGETVARPLFLEFPKDSSTWTVDHQLLWGEALLITPVLQAGK
AEVTGYFPLGTWYDLQTVPVEALGSLPPPPAAPREPAIHSEGQWVTLPAP
LDTINVHLRAGYIIPLQGPGLTTTESRQQPMALAVALTKGGEARGELFWD
DGESLEVLERGAYTQVIFLARNNTIVNELVRVTSEGAGLQLQKVTVLGVA
TAPQQVLSNGVPVSNFTYSPDTKVLDICVSLLMGEQFLVSWC(SEQ ID
NO: 571)

[0956] 12841B (REGN16823)

DIQMTQSPSSLSASVGDRVTITCRASQSISSYLNWYQQKPGKAPKLLIYA
ASSLQSGVPSRFSGSGSGTDFTLTISSLQPEDFATYYCQQSYSTPPITFG
QGTRLEIKGGGGSGGGGSGGGGSEVQLVESGGGLVQPGGSLRLSCAASGF
TFSNYWMNWVRQAPGKGLEWVANIKEDGGKKLYVDSVKGRFTISRDNAKN
SLFLQMNSLRAEDTAVYYCAREDTTLVVDYYYYGMDVWGQGTTVTVSSGG
GGSGGGGSAHPGRPRAVPTQCDVPPNSRFDCAPDKAITQEQCEARGCCYI
PAKQGLQGAQMGQPWCFFPPSYPSYKLENLSSSEMGYTATLTRTTPTFFP
KDILTLRLDVMMETENRLHFTIKDPANRRYEVPLETPHVHSRAPSPLYSV
EFSEEPFGVIVRRQLDGRVLLNTTVAPLFFADQFLQLSTSLPSQYITGLA
EHLSPLMLSTSWTRITLWNRDLAPTPGANLYGSHPFYLALEDGGSAHGVF
LLNSNAMDVVLQPSPALSWRSTGGILDVYIFLGPEPKSVVQQYLDVVGYP
FMPPYWGLGFHLCRWGYSSTAITRQVVENMTRAHFPLDVQWNDLDYMDSR
RDFTFNKDGFRDFPAMVQELHQGGRRYMMIVDPAISSSGPAGSYRPYDEG
LRRGVFITNETGQPLIGKVWPGSTAFPDFTNPTALAWWEDMVAEFHDQVP
FDGMWIDMNEPSNFIRGSEDGCPNNELENPPYVPGVVGGTLQAATICASS
HQFLSTHYNLHNLYGLTEAIASHRALVKARGTRPFVISRSTFAGHGRYAG
HWTGDVWSSWEQLASSVPEILQFNLLGVPLVGADVCGFLGNTSEELCVRW
TQLGAFYPFMRNHNSLLSLPQEPYSFSEPAQQAMRKALTLRYALLPHLYT
LFHQAHVAGETVARPLFLEFPKDSSTWTVDHQLLWGEALLITPVLQAGKA
EVTGYFPLGTWYDLQTVPVEALGSLPPPPAAPREPAIHSEGQWVTLPAPL
DTINVHLRAGYIIPLQGPGLTTTESRQQPMALAVALTKGGEARGELFWDD
GESLEVLERGAYTQVIFLARNNTIVNELVRVTSEGAGLQLQKVTVLGVAT
APQQVLSNGVPVSNFTYSPDTKVLDICVSLLMGEQFLVSWC(SEQ ID N
O: 685)

[0957] 12843B (REGN16824)

DIQMTQSPSSLSASVGDRVTITCRASQSISSYLNWYQQKPGKAPKLLIYA
ASSLQSGVPSRFSGSGSGTDFTLTISSLQPEDFATYYCQQSYSTPPITFG
QGTRLEIKGGGGSGGGGSGGGGSEVQLVESGGGLVQPGGSLRLSCAASGF
TFNIFEMNWVRQAPGKGLEWISYISSRGTTTYYADSVRGRFTISRDNAKN
SLYLQMNSLRAEDTAVYYCARDYEATIPFDFWGQGTLVTVSSGGGGSGGG
GSAHPGRPRAVPTQCDVPPNSRFDCAPDKAITQEQCEARGCCYIPAKQGL
QGAQMGQPWCFFPPSYPSYKLENLSSSEMGYTATLTRTTPTFFPKDILTL
RLDVMMETENRLHFTIKDPANRRYEVPLETPHVHSRAPSPLYSVEFSEEP
FGVIVRRQLDGRVLLNTTVAPLFFADQFLQLSTSLPSQYITGLAEHLSPL
MLSTSWTRITLWNRDLAPTPGANLYGSHPFYLALEDGGSAHGVFLLNSNA
MDVVLQPSPALSWRSTGGILDVYIFLGPEPKSVVQQYLDVVGYPFMPPYW
GLGFHLCRWGYSSTAITRQVVENMTRAHFPLDVQWNDLDYMDSRRDFTFN
KDGFRDFPAMVQELHQGGRRYMMIVDPAISSSGPAGSYRPYDEGLRRGVF
ITNETGQPLIGKVWPGSTAFPDFTNPTALAWWEDMVAEFHDQVPFDGMWI
DMNEPSNFIRGSEDGCPNNELENPPYVPGVVGGTLQAATICASSHQFLST
HYNLHNLYGLTEAIASHRALVKARGTRPFVISRSTFAGHGRYAGHWTGDV
WSSWEQLASSVPEILQFNLLGVPLVGADVCGFLGNTSEELCVRWTQLGAF
YPFMRNHNSLLSLPQEPYSFSEPAQQAMRKALTLRYALLPHLYTLFHQAH
VAGETVARPLFLEFPKDSSTWTVDHQLLWGEALLITPVLQAGKAEVTGYF
PLGTWYDLQTVPVEALGSLPPPPAAPREPAIHSEGQWVTLPAPLDTINVH
LRAGYIIPLQGPGLTTTESRQQPMALAVALTKGGEARGELFWDDGESLEV
LERGAYTQVIFLARNNTIVNELVRVTSEGAGLQLQKVTVLGVATAPQQVL
SNGVPVSNFTYSPDTKVLDICVSLLMGEQFLVSWC(SEQ ID NO: 572
)

[0958] 12844B

DIQMTQSPSSLSASVGDRVTITCRASQSISSYLNWYQQKPGKAPKLLIYA
ASSLQSGVPSRFSGSGSGTDFTLTISSLQPEDFATYYCQQSYSTPPITFG
QGTRLEIKGGGGSGGGGSGGGGSEVQLVESGGSVVRPGGSLRLSCEASGF
TFDDYGMSWVRQDPGKGLEWVSGINWNGDRTNYADSVKGRFIISRDNAKN
SVYLQMNSLRAEDSALYHCARDQGLGVAATLDYWGQGTLVTVSSGGGGSG
GGGSAHPGRPRAVPTQCDVPPNSRFDCAPDKAITQEQCEARGCCYIPAKQ
GLQGAQMGQPWCFFPPSYPSYKLENLSSSEMGYTATLTRTTPTFFPKDIL
TLRLDVMMETENRLHFTIKDPANRRYEVPLETPHVHSRAPSPLYSVEFSE
EPFGVIVRRQLDGRVLLNTTVAPLFFADQFLQLSTSLPSQYITGLAEHLS
PLMLSTSWTRITLWNRDLAPTPGANLYGSHPFYLALEDGGSAHGVFLLNS
NAMDVVLQPSPALSWRSTGGILDVYIFLGPEPKSVVQQYLDVVGYPFMPP
YWGLGFHLCRWGYSSTAITRQVVENMTRAHFPLDVQWNDLDYMDSRRDFT
FNKDGFRDFPAMVQELHQGGRRYMMIVDPAISSSGPAGSYRPYDEGLRRG
VFITNETGQPLIGKVWPGSTAFPDFTNPTALAWWEDMVAEFHDQVPFDGM
WIDMNEPSNFIRGSEDGCPNNELENPPYVPGVVGGTLQAATICASSHQFL
STHYNLHNLYGLTEAIASHRALVKARGTRPFVISRSTFAGHGRYAGHWTG
DVWSSWEQLASSVPEILQFNLLGVPLVGADVCGFLGNTSEELCVRWTQLG
AFYPFMRNHNSLLSLPQEPYSFSEPAQQAMRKALTLRYALLPHLYTLFHQ
AHVAGETVARPLFLEFPKDSSTWTVDHQLLWGEALLITPVLQAGKAEVTG
YFPLGTWYDLQTVPVEALGSLPPPPAAPREPAIHSEGQWVTLPAPLDTIN
VHLRAGYIIPLQGPGLTTTESRQQPMALAVALTKGGEARGELFWDDGESL
EVLERGAYTQVIFLARNNTIVNELVRVTSEGAGLQLQKVTVLGVATAPQQ
VLSNGVPVSNFTYSPDTKVLDICVSLLMGEQFLVSWC(SEQ ID NO: 6
86)

[0959] 12845B (REGN16825)

DIQMTQSPSSLSASVGDRVTITCRASQSISSYLNWYQQKPGKAPKLLIYA
ASSLQSGVPSRFSGSGSGTDFTLTISSLQPEDFATYYCQQSYSTPPITFG
QGTRLEIKGGGGSGGGGSGGGGSEVQLVESGGGLVQPGGSLRLSCAASGF
TVSNYEMNWVRQAPGKGLEWVSYISSSTSNIYYADSVKGRFTISRDNAEN
SLYLQMNSLRVEDTAVYYCVRDGIVVVPVGRGYYYYGLDVWGQGTTVTVS
SGGGGSGGGGSAHPGRPRAVPTQCDVPPNSRFDCAPDKAITQEQCEARGC
CYIPAKQGLQGAQMGQPWCFFPPSYPSYKLENLSSSEMGYTATLTRTTPT
FFPKDILTLRLDVMMETENRLHFTIKDPANRRYEVPLETPHVHSRAPSPL
YSVEFSEEPFGVIVRRQLDGRVLLNTTVAPLFFADQFLQLSTSLPSQYIT
GLAEHLSPLMLSTSWTRITLWNRDLAPTPGANLYGSHPFYLALEDGGSAH
GVFLLNSNAMDVVLQPSPALSWRSTGGILDVYIFLGPEPKSVVQQYLDVV
GYPFMPPYWGLGFHLCRWGYSSTAITRQVVENMTRAHFPLDVQWNDLDYM
DSRRDFTFNKDGFRDFPAMVQELHQGGRRYMMIVDPAISSSGPAGSYRPY
DEGLRRGVFITNETGQPLIGKVWPGSTAFPDFTNPTALAWWEDMVAEFHD
QVPFDGMWIDMNEPSNFIRGSEDGCPNNELENPPYVPGVVGGTLQAATIC
ASSHQFLSTHYNLHNLYGLTEAIASHRALVKARGTRPFVISRSTFAGHGR
YAGHWTGDVWSSWEQLASSVPEILQFNLLGVPLVGADVCGFLGNTSEELC
VRWTQLGAFYPFMRNHNSLLSLPQEPYSFSEPAQQAMRKALTLRYALLPH
LYTLFHQAHVAGETVARPLFLEFPKDSSTWTVDHQLLWGEALLITPVLQA
GKAEVTGYFPLGTWYDLQTVPVEALGSLPPPPAAPREPAIHSEGQWVTLP
APLDTINVHLRAGYIIPLQGPGLTTTESRQQPMALAVALTKGGEARGELF
WDDGESLEVLERGAYTQVIFLARNNTIVNELVRVTSEGAGLQLQKVTVLG
VATAPQQVLSNGVPVSNFTYSPDTKVLDICVSLLMGEQFLVSWC(SEQ I
D NO: 687)

[0960] 12847B (REGN16826)

DIQMTQSPSSLSASVGDRVTITCRASQSISSYLNWYQQKPGKAPKLLIYA
ASSLQSGVPSRFSGSGSGTDFTLTISSLQPEDFATYYCQQSYSTPPITFG
QGTRLEIKGGGGSGGGGSGGGGSEVQLVESGGGLVQPGRSLRLSCAASGF
TFDDYAMNWVRQAPGKGLEWVSGISWSSGSMDYADSVKGRFTISRDNAKN
SLYLQMNSLRTEDTALYYCAKAREVGDYYGMDVWGQGTTVTVSSGGGGSG
GGGSAHPGRPRAVPTQCDVPPNSRFDCAPDKAITQEQCEARGCCYIPAKQ
GLQGAQMGQPWCFFPPSYPSYKLENLSSSEMGYTATLTRTTPTFFPKDIL
TLRLDVMMETENRLHFTIKDPANRRYEVPLETPHVHSRAPSPLYSVEFSE
EPFGVIVRRQLDGRVLLNTTVAPLFFADQFLQLSTSLPSQYITGLAEHLS
PLMLSTSWTRITLWNRDLAPTPGANLYGSHPFYLALEDGGSAHGVFLLNS
NAMDVVLQPSPALSWRSTGGILDVYIFLGPEPKSVVQQYLDVVGYPFMPP
YWGLGFHLCRWGYSSTAITRQVVENMTRAHFPLDVQWNDLDYMDSRRDFT
FNKDGFRDFPAMVQELHQGGRRYMMIVDPAISSSGPAGSYRPYDEGLRRG
VFITNETGQPLIGKVWPGSTAFPDFTNPTALAWWEDMVAEFHDQVPFDGM
WIDMNEPSNFIRGSEDGCPNNELENPPYVPGVVGGTLQAATICASSHQFL
STHYNLHNLYGLTEAIASHRALVKARGTRPFVISRSTFAGHGRYAGHWTG
DVWSSWEQLASSVPEILQFNLLGVPLVGADVCGFLGNTSEELCVRWTQLG
AFYPFMRNHNSLLSLPQEPYSFSEPAQQAMRKALTLRYALLPHLYTLFHQ
AHVAGETVARPLFLEFPKDSSTWTVDHQLLWGEALLITPVLQAGKAEVTG
YFPLGTWYDLQTVPVEALGSLPPPPAAPREPAIHSEGQWVTLPAPLDTIN
VHLRAGYIIPLQGPGLTTTESRQQPMALAVALTKGGEARGELFWDDGESL
EVLERGAYTQVIFLARNNTIVNELVRVTSEGAGLQLQKVTVLGVATAPQQ
VLSNGVPVSNFTYSPDTKVLDICVSLLMGEQFLVSWC(SEQ ID NO: 5
73)

[0961] 12848B (REGN16827)

EIVLTQSPGTLSLSPGERATLSCRASQSVSSSYLAWYQQKPGQAPRLLIY
GASSRATGIPDRFSGSGSGTDFTLTISRLEPEDFAVYYCQQYGSSPWTFG
QGTKVEIKGGGGSGGGGSGGGGSEVQLVESGGGLVQPGRSLTLSCAASGF
TFDNFGMHWVRQGPGKGLEWVSGLTWNSGVIGYADSVKGRFTISRDNAKN
SLYLQMNSLRPEDTALYYCAKDIRNYGPFDYWGQGTLVTVSSGGGGSGGG
GSAHPGRPRAVPTQCDVPPNSRFDCAPDKAITQEQCEARGCCYIPAKQGL
QGAQMGQPWCFFPPSYPSYKLENLSSSEMGYTATLTRTTPTFFPKDILTL
RLDVMMETENRLHFTIKDPANRRYEVPLETPHVHSRAPSPLYSVEFSEEP
FGVIVRRQLDGRVLLNTTVAPLFFADQFLQLSTSLPSQYITGLAEHLSPL
MLSTSWTRITLWNRDLAPTPGANLYGSHPFYLALEDGGSAHGVFLLNSNA
MDVVLQPSPALSWRSTGGILDVYIFLGPEPKSVVQQYLDVVGYPFMPPYW
GLGFHLCRWGYSSTAITRQVVENMTRAHFPLDVQWNDLDYMDSRRDFTFN
KDGFRDFPAMVQELHQGGRRYMMIVDPAISSSGPAGSYRPYDEGLRRGVF
ITNETGQPLIGKVWPGSTAFPDFTNPTALAWWEDMVAEFHDQVPFDGMWI
DMNEPSNFIRGSEDGCPNNELENPPYVPGVVGGTLQAATICASSHQFLST
HYNLHNLYGLTEAIASHRALVKARGTRPFVISRSTFAGHGRYAGHWTGDV
WSSWEQLASSVPEILQFNLLGVPLVGADVCGFLGNTSEELCVRWTQLGAF
YPFMRNHNSLLSLPQEPYSFSEPAQQAMRKALTLRYALLPHLYTLFHQAH
VAGETVARPLFLEFPKDSSTWTVDHQLLWGEALLITPVLQAGKAEVTGYF
PLGTWYDLQTVPVEALGSLPPPPAAPREPAIHSEGQWVTLPAPLDTINVH
LRAGYIIPLQGPGLTTTESRQQPMALAVALTKGGEARGELFWDDGESLEV
LERGAYTQVIFLARNNTIVNELVRVTSEGAGLQLQKVTVLGVATAPQQVL
SNGVPVSNFTYSPDTKVLDICVSLLMGEQFLVSWC(SEQ ID NO: 688
)

[0962] 12850B (REGN16828)

EIVLTQSPGTLSLSPGERATLSCRASQSVSSSYLAWYQQKPGQAPRLLIY
GASSRATGIPDRFSGSGSGTDFTLTISRLEPEDFAVYYCQQYGSSPWTFG
QGTKVEIKGGGGSGGGGSGGGGSQVQLVQSGAEVKKPGSSVKVSCKASGG
TFNTYAITWVRQAPGQGLEWMGGIIPISGIAEYAQKFQGRVTITTDDSST
TAYMELNSLRSEDTAVYYCASWNYALYYFYGMDVWGRGTTVTVSSGGGGS
GGGGSAHPGRPRAVPTQCDVPPNSRFDCAPDKAITQEQCEARGCCYIPAK
QGLQGAQMGQPWCFFPPSYPSYKLENLSSSEMGYTATLTRTTPTFFPKDI
LTLRLDVMMETENRLHFTIKDPANRRYEVPLETPHVHSRAPSPLYSVEFS
EEPFGVIVRRQLDGRVLLNTTVAPLFFADQFLQLSTSLPSQYITGLAEHL
SPLMLSTSWTRITLWNRDLAPTPGANLYGSHPFYLALEDGGSAHGVFLLN
SNAMDVVLQPSPALSWRSTGGILDVYIFLGPEPKSVVQQYLDVVGYPFMP
PYWGLGFHLCRWGYSSTAITRQVVENMTRAHFPLDVQWNDLDYMDSRRDF
TFNKDGFRDFPAMVQELHQGGRRYMMIVDPAISSSGPAGSYRPYDEGLRR
GVFITNETGQPLIGKVWPGSTAFPDFTNPTALAWWEDMVAEFHDQVPFDG
MWIDMNEPSNFIRGSEDGCPNNELENPPYVPGVVGGTLQAATICASSHQF
LSTHYNLHNLYGLTEAIASHRALVKARGTRPFVISRSTFAGHGRYAGHWT
GDVWSSWEQLASSVPEILQFNLLGVPLVGADVCGFLGNTSEELCVRWTQL
GAFYPFMRNHNSLLSLPQEPYSFSEPAQQAMRKALTLRYALLPHLYTLFH
QAHVAGETVARPLFLEFPKDSSTWTVDHQLLWGEALLITPVLQAGKAEVT
GYFPLGTWYDLQTVPVEALGSLPPPPAAPREPAIHSEGQWVTLPAPLDTI
NVHLRAGYIIPLQGPGLTTTESRQQPMALAVALTKGGEARGELFWDDGES
LEVLERGAYTQVIFLARNNTIVNELVRVTSEGAGLQLQKVTVLGVATAPQ
QVLSNGVPVSNFTYSPDTKVLDICVSLLMGEQFLVSWC(SEQ ID NO:
689)

[0963] 31863B

DIQMTQSPSSLSASIGDRVTITCRASQGISNYLAWYQQKPGKVPKLLIYA
ASTLQSGVPSRFSGSGSGTDFTLTISSLQPEDVATYYCQNHNSVPLTFGG
GTKVEIKGGGGSGGGGSGGGGSEVQLVESGGGLVQPGGSLRLSCAASGFT
FNSYAMTWVRQAPGKGLEWVSFIGGSTGNTYYAGSVKGRFTISSDNSKKT
LYLQMNSLRAEDTAVYYCAKGGAARRMEYFQHWGQGTLVTVSSGGGGSGG
GGSAHPGRPRAVPTQCDVPPNSRFDCAPDKAITQEQCEARGCCYIPAKQG
LQGAQMGQPWCFFPPSYPSYKLENLSSSEMGYTATLTRTTPTFFPKDILT
LRLDVMMETENRLHFTIKDPANRRYEVPLETPHVHSRAPSPLYSVEFSEE
PFGVIVRRQLDGRVLLNTTVAPLFFADQFLQLSTSLPSQYITGLAEHLSP
LMLSTSWTRITLWNRDLAPTPGANLYGSHPFYLALEDGGSAHGVFLLNSN
AMDVVLQPSPALSWRSTGGILDVYIFLGPEPKSVVQQYLDVVGYPFMPPY
WGLGFHLCRWGYSSTAITRQVVENMTRAHFPLDVQWNDLDYMDSRRDFTF
NKDGFRDFPAMVQELHQGGRRYMMIVDPAISSSGPAGSYRPYDEGLRRGV
FITNETGQPLIGKVWPGSTAFPDFTNPTALAWWEDMVAEFHDQVPFDGMW
IDMNEPSNFIRGSEDGCPNNELENPPYVPGVVGGTLQAATICASSHQFLS
THYNLHNLYGLTEAIASHRALVKARGTRPFVISRSTFAGHGRYAGHWTGD
VWSSWEQLASSVPEILQFNLLGVPLVGADVCGFLGNTSEELCVRWTQLGA
FYPFMRNHNSLLSLPQEPYSFSEPAQQAMRKALTLRYALLPHLYTLFHQA
HVAGETVARPLFLEFPKDSSTWTVDHQLLWGEALLITPVLQAGKAEVTGY
FPLGTWYDLQTVPVEALGSLPPPPAAPREPAIHSEGQWVTLPAPLDTINV
HLRAGYIIPLQGPGLTTTESRQQPMALAVALTKGGEARGELFWDDGESLE
VLERGAYTQVIFLARNNTIVNELVRVTSEGAGLQLQKVTVLGVATAPQQV
LSNGVPVSNFTYSPDTKVLDICVSLLMGEQFLVSWC(SEQ ID NO: 69
0)

[0964] 31874B

DIQMTQSPSSLSASVGDRVTITCRASQGISNYLAWYQQKPGKVPNLLIYA
ASTLQSGVPSRFSGSGSGTDFTLTISSLQPEDVATYYCQKYNSAPLTFGG
GTKVEIKGGGGSGGGGSGGGGSEVQLVESGGGLVQPGGSLRLSCAASGFA
FSSYAMTWVRQAPGKGLEWVSVISGTGGSTYYADSVKGRFTISRDNSKNT
LYLQMNSLRAEDTAVYYCAKGGAARRMEYFQYWGQGTLVTVSSGGGGSGG
GGSAHPGRPRAVPTQCDVPPNSRFDCAPDKAITQEQCEARGCCYIPAKQG
LQGAQMGQPWCFFPPSYPSYKLENLSSSEMGYTATLTRTTPTFFPKDILT
LRLDVMMETENRLHFTIKDPANRRYEVPLETPHVHSRAPSPLYSVEFSEE
PFGVIVRRQLDGRVLLNTTVAPLFFADQFLQLSTSLPSQYITGLAEHLSP
LMLSTSWTRITLWNRDLAPTPGANLYGSHPFYLALEDGGSAHGVFLLNSN
AMDVVLQPSPALSWRSTGGILDVYIFLGPEPKSVVQQYLDVVGYPFMPPY
WGLGFHLCRWGYSSTAITRQVVENMTRAHFPLDVQWNDLDYMDSRRDFTF
NKDGFRDFPAMVQELHQGGRRYMMIVDPAISSSGPAGSYRPYDEGLRRGV
FITNETGQPLIGKVWPGSTAFPDFTNPTALAWWEDMVAEFHDQVPFDGMW
IDMNEPSNFIRGSEDGCPNNELENPPYVPGVVGGTLQAATICASSHQFLS
THYNLHNLYGLTEAIASHRALVKARGTRPFVISRSTFAGHGRYAGHWTGD
VWSSWEQLASSVPEILQFNLLGVPLVGADVCGFLGNTSEELCVRWTQLGA
FYPFMRNHNSLLSLPQEPYSFSEPAQQAMRKALTLRYALLPHLYTLFHQA
HVAGETVARPLFLEFPKDSSTWTVDHQLLWGEALLITPVLQAGKAEVTGY
FPLGTWYDLQTVPVEALGSLPPPPAAPREPAIHSEGQWVTLPAPLDTINV
HLRAGYIIPLQGPGLTTTESRQQPMALAVALTKGGEARGELFWDDGESLE
VLERGAYTQVIFLARNNTIVNELVRVTSEGAGLQLQKVTVLGVATAPQQV
LSNGVPVSNFTYSPDTKVLDICVSLLMGEQFLVSWC(SEQ ID NO: 69
1)

[0965] 69261

DIVMTQSPLSLPVTPGEPASISCRSSQSLLHSNGYNYLDWYLQKPGQSPQ
FLIYLGSNRASGVPDRFSGSGSGTDFTLKINRVEAEDVGVYYCMQALQTP
YTFGQGTKLEIKGGGGSGGGGSGGGGSQVQLVESGGGLVKPGGSLRLSCA
ASGFTFSVYYMNWIRQAPGKGLEWVSYISSSGSTIYYADSVKGRFTISRD
NAKNSLYLQMNSLRAEDTAVYYCGREGYSGTYSYYGMDVWGQGTTVTVSS
GGGGSGGGGSAHPGRPRAVPTQCDVPPNSRFDCAPDKAITQEQCEARGCC
YIPAKQGLQGAQMGQPWCFFPPSYPSYKLENLSSSEMGYTATLTRTTPTF
FPKDILTLRLDVMMETENRLHFTIKDPANRRYEVPLETPHVHSRAPSPLY
SVEFSEEPFGVIVRRQLDGRVLLNTTVAPLFFADQFLQLSTSLPSQYITG
LAEHLSPLMLSTSWTRITLWNRDLAPTPGANLYGSHPFYLALEDGGSAHG
VFLLNSNAMDVVLQPSPALSWRSTGGILDVYIFLGPEPKSVVQQYLDVVG
YPFMPPYWGLGFHLCRWGYSSTAITRQVVENMTRAHFPLDVQWNDLDYMD
SRRDFTFNKDGFRDFPAMVQELHQGGRRYMMIVDPAISSSGPAGSYRPYD
EGLRRGVFITNETGQPLIGKVWPGSTAFPDFTNPTALAWWEDMVAEFHDQ
VPFDGMWIDMNEPSNFIRGSEDGCPNNELENPPYVPGVVGGTLQAATICA
SSHQFLSTHYNLHNLYGLTEAIASHRALVKARGTRPFVISRSTFAGHGRY
AGHWTGDVWSSWEQLASSVPEILQFNLLGVPLVGADVCGFLGNTSEELCV
RWTQLGAFYPFMRNHNSLLSLPQEPYSFSEPAQQAMRKALTLRYALLPHL
YTLFHQAHVAGETVARPLFLEFPKDSSTWTVDHQLLWGEALLITPVLQAG
KAEVTGYFPLGTWYDLQTVPVEALGSLPPPPAAPREPAIHSEGQWVTLPA
PLDTINVHLRAGYIIPLQGPGLTTTESRQQPMALAVALTKGGEARGELFW
DDGESLEVLERGAYTQVIFLARNNTIVNELVRVTSEGAGLQLQKVTVLGV
ATAPQQVLSNGVPVSNFTYSPDTKVLDICVSLLMGEQFLVSWC(SEQ ID
NO: 692)

[0966] 69263

DIQMTQSPSSLSASVGDRVTITCRASQDISHYSAWYQQKPGKLPNLLIYA
ASTLQSGVPSRFSGSGSGTDFSLTTSSLQPEDVATYYCQKYNSVPLTFGG
GTKVEIKGGGGSGGGGSGGGGSEVQLVESGGGLVQPGRSLRLSCAVSGFT
FDDYAMHWVRQAPGKGLEWVSGISWNSGTRGYADSVKGRFTISRDNAKNS
LYLQMNSLRGEDTALYYCVKDITISPNYYGMDVWGQGTTVTVSSGGGGSG
GGGSAHPGRPRAVPTQCDVPPNSRFDCAPDKAITQEQCEARGCCYIPAKQ
GLQGAQMGQPWCFFPPSYPSYKLENLSSSEMGYTATLTRTTPTFFPKDIL
TLRLDVMMETENRLHFTIKDPANRRYEVPLETPHVHSRAPSPLYSVEFSE
EPFGVIVRRQLDGRVLLNTTVAPLFFADQFLQLSTSLPSQYITGLAEHLS
PLMLSTSWTRITLWNRDLAPTPGANLYGSHPFYLALEDGGSAHGVFLLNS
NAMDVVLQPSPALSWRSTGGILDVYIFLGPEPKSVVQQYLDVVGYPFMPP
YWGLGFHLCRWGYSSTAITRQVVENMTRAHFPLDVQWNDLDYMDSRRDFT
FNKDGFRDFPAMVQELHQGGRRYMMIVDPAISSSGPAGSYRPYDEGLRRG
VFITNETGQPLIGKVWPGSTAFPDFTNPTALAWWEDMVAEFHDQVPFDGM
WIDMNEPSNFIRGSEDGCPNNELENPPYVPGVVGGTLQAATICASSHQFL
STHYNLHNLYGLTEAIASHRALVKARGTRPFVISRSTFAGHGRYAGHWTG
DVWSSWEQLASSVPEILQFNLLGVPLVGADVCGFLGNTSEELCVRWTQLG
AFYPFMRNHNSLLSLPQEPYSFSEPAQQAMRKALTLRYALLPHLYTLFHQ
AHVAGETVARPLFLEFPKDSSTWTVDHQLLWGEALLITPVLQAGKAEVTG
YFPLGTWYDLQTVPVEALGSLPPPPAAPREPAIHSEGQWVTLPAPLDTIN
VHLRAGYIIPLQGPGLTTTESRQQPMALAVALTKGGEARGELFWDDGESL
EVLERGAYTQVIFLARNNTIVNELVRVTSEGAGLQLQKVTVLGVATAPQQ
VLSNGVPVSNFTYSPDTKVLDICVSLLMGEQFLVSWC(SEQ ID NO: 6
93)

[0967] 69305

DIQMTQSPSSLSASVGDRVTITCRASQSIDRYLNWYRQKPGKAPKLLIYT
TSSLQSGVPSRFSGSGSGTDFTLTLSSLQPEDFATYYCQQSYSPPLTFGG
GTKVEIKGGGGSGGGGSGGGGSQVQLVESGGGVVQPGRSLRLSCAASGFT
FSSYGMHWVRQAPGKGLEWVAVIWYDGSNKYYADSVKGRFTISRDISKNT
LYLQMNSLRAEDTAVYYCAGQLDLFFDYWGQGTLVTVSSGGGGSGGGGSA
HPGRPRAVPTQCDVPPNSRFDCAPDKAITQEQCEARGCCYIPAKQGLQGA
QMGQPWCFFPPSYPSYKLENLSSSEMGYTATLTRTTPTFFPKDILTLRLD
VMMETENRLHFTIKDPANRRYEVPLETPHVHSRAPSPLYSVEFSEEPFGV
IVRRQLDGRVLLNTTVAPLFFADQFLQLSTSLPSQYITGLAEHLSPLMLS
TSWTRITLWNRDLAPTPGANLYGSHPFYLALEDGGSAHGVFLLNSNAMDV
VLQPSPALSWRSTGGILDVYIFLGPEPKSVVQQYLDVVGYPFMPPYWGLG
FHLCRWGYSSTAITRQVVENMTRAHFPLDVQWNDLDYMDSRRDFTFNKDG
FRDFPAMVQELHQGGRRYMMIVDPAISSSGPAGSYRPYDEGLRRGVFITN
ETGQPLIGKVWPGSTAFPDFTNPTALAWWEDMVAEFHDQVPFDGMWIDMN
EPSNFIRGSEDGCPNNELENPPYVPGVVGGTLQAATICASSHQFLSTHYN
LHNLYGLTEAIASHRALVKARGTRPFVISRSTFAGHGRYAGHWTGDVWSS
WEQLASSVPEILQFNLLGVPLVGADVCGFLGNTSEELCVRWTQLGAFYPF
MRNHNSLLSLPQEPYSFSEPAQQAMRKALTLRYALLPHLYTLFHQAHVAG
ETVARPLFLEFPKDSSTWTVDHQLLWGEALLITPVLQAGKAEVTGYFPLG
TWYDLQTVPVEALGSLPPPPAAPREPAIHSEGQWVTLPAPLDTINVHLRA
GYIIPLQGPGLTTTESRQQPMALAVALTKGGEARGELFWDDGESLEVLER
GAYTQVIFLARNNTIVNELVRVTSEGAGLQLQKVTVLGVATAPQQVLSNG
VPVSNFTYSPDTKVLDICVSLLMGEQFLVSWC(SEQ ID NO: 694)

[0968] 69307 (REGN16817)

DIQMTQSPSSVSASVGDRVTITCRASQGISSWLAWYQQKPGKAPKLLIYA
ASSLQSGVPSRFSGSGSGTDFTLTISSLQPEDFATYYCQKADSLPYAFGQ
GTKLEIKGGGGSGGGGSGGGGSEVQLVESGGGLVQPGGSLRLSCTASGFT
FSNYWMTWVRQAPGKGLEWVANIKEDGSEKEYVDSVKGRFTISRDNAKNS
LYLQMNSLRGEDTAVYYCARDGEQLVDYYYYYVMDVWGQGTTVTVSSGGG
GSGGGGSAHPGRPRAVPTQCDVPPNSRFDCAPDKAITQEQCEARGCCYIP
AKQGLQGAQMGQPWCFFPPSYPSYKLENLSSSEMGYTATLTRTTPTFFPK
DILTLRLDVMMETENRLHFTIKDPANRRYEVPLETPHVHSRAPSPLYSVE
FSEEPFGVIVRRQLDGRVLLNTTVAPLFFADQFLQLSTSLPSQYITGLAE
HLSPLMLSTSWTRITLWNRDLAPTPGANLYGSHPFYLALEDGGSAHGVFL
LNSNAMDVVLQPSPALSWRSTGGILDVYIFLGPEPKSVVQQYLDVVGYPF
MPPYWGLGFHLCRWGYSSTAITRQVVENMTRAHFPLDVQWNDLDYMDSRR
DFTFNKDGFRDFPAMVQELHQGGRRYMMIVDPAISSSGPAGSYRPYDEGL
RRGVFITNETGQPLIGKVWPGSTAFPDFTNPTALAWWEDMVAEFHDQVPF
DGMWIDMNEPSNFIRGSEDGCPNNELENPPYVPGVVGGTLQAATICASSH
QFLSTHYNLHNLYGLTEAIASHRALVKARGTRPFVISRSTFAGHGRYAGH
WTGDVWSSWEQLASSVPEILQFNLLGVPLVGADVCGFLGNTSEELCVRWT
QLGAFYPFMRNHNSLLSLPQEPYSFSEPAQQAMRKALTLRYALLPHLYTL
FHQAHVAGETVARPLFLEFPKDSSTWTVDHQLLWGEALLITPVLQAGKAE
VTGYFPLGTWYDLQTVPVEALGSLPPPPAAPREPAIHSEGQWVTLPAPLD
TINVHLRAGYIIPLQGPGLTTTESRQQPMALAVALTKGGEARGELFWDDG
ESLEVLERGAYTQVIFLARNNTIVNELVRVTSEGAGLQLQKVTVLGVATA
PQQVLSNGVPVSNFTYSPDTKVLDICVSLLMGEQFLVSWC(SEQ ID NO
: 695)

[0969] 69323 (REGN16816)

DIQMTQSPSSLSASVGDRVTITCRASQSISSYLNWYQQKPGKAPKVLIYA
ASSLQSGVPSRFSGSGSGTDFTLTISSLQPEDFATYYCQQSYSIPLTFGG
GTKVEIKGGGGSGGGGSGGGGSEVQLVESGGGLVQPGRSLRLSCAASGFT
FDDYAMHWVRQAPGKGLEWVSGISWNSGYIGYADSVKGRFTISRDNAENS
LHLQMNSLRAEDTALYYCARGGSTLVRGVKGGYYGMDVWGQGTTVTVSSG
GGGSGGGGSAHPGRPRAVPTQCDVPPNSRFDCAPDKAITQEQCEARGCCY
IPAKQGLQGAQMGQPWCFFPPSYPSYKLENLSSSEMGYTATLTRTTPTFF
PKDILTLRLDVMMETENRLHFTIKDPANRRYEVPLETPHVHSRAPSPLYS
VEFSEEPFGVIVRRQLDGRVLLNTTVAPLFFADQFLQLSTSLPSQYITGL
AEHLSPLMLSTSWTRITLWNRDLAPTPGANLYGSHPFYLALEDGGSAHGV
FLLNSNAMDVVLQPSPALSWRSTGGILDVYIFLGPEPKSVVQQYLDVVGY
PFMPPYWGLGFHLCRWGYSSTAITRQVVENMTRAHFPLDVQWNDLDYMDS
RRDFTFNKDGFRDFPAMVQELHQGGRRYMMIVDPAISSSGPAGSYRPYDE
GLRRGVFITNETGQPLIGKVWPGSTAFPDFTNPTALAWWEDMVAEFHDQV
PFDGMWIDMNEPSNFIRGSEDGCPNNELENPPYVPGVVGGTLQAATICAS
SHQFLSTHYNLHNLYGLTEAIASHRALVKARGTRPFVISRSTFAGHGRYA
GHWTGDVWSSWEQLASSVPEILQFNLLGVPLVGADVCGFLGNTSEELCVR
WTQLGAFYPFMRNHNSLLSLPQEPYSFSEPAQQAMRKALTLRYALLPHLY
TLFHQAHVAGETVARPLFLEFPKDSSTWTVDHQLLWGEALLITPVLQAGK
AEVTGYFPLGTWYDLQTVPVEALGSLPPPPAAPREPAIHSEGQWVTLPAP
LDTINVHLRAGYIIPLQGPGLTTTESRQQPMALAVALTKGGEARGELFWD
DGESLEVLERGAYTQVIFLARNNTIVNELVRVTSEGAGLQLQKVTVLGVA
TAPQQVLSNGVPVSNFTYSPDTKVLDICVSLLMGEQFLVSWC(SEQ ID
NO: 696)

[0970] 69326

EIVMTQSPATLSVSPGERATLSCRASQSVSSNFAWYQQKPGQAPRLLIYS
ASSRATGIPVRFSGSGSGTEFTLTISSLQSEDFAVYYCQQYNIWPRTFGQ
GTKVEIKGGGGSGGGGSGGGGSEVQLVESGGGLVQPGGSLRLSCAVSGFI
FSSYEMNWVRQAPGKGLEWVSYISSSGSTIFYADSVKGRFTISRDNAKNS
LYLQMNSLRAEDTAVYYCVSGVVLFDVWGQGTMVTVSSGGGGSGGGGSAH
PGRPRAVPTQCDVPPNSRFDCAPDKAITQEQCEARGCCYIPAKQGLQGAQ
MGQPWCFFPPSYPSYKLENLSSSEMGYTATLTRTTPTFFPKDILTLRLDV
MMETENRLHFTIKDPANRRYEVPLETPHVHSRAPSPLYSVEFSEEPFGVI
VRRQLDGRVLLNTTVAPLFFADQFLQLSTSLPSQYITGLAEHLSPLMLST
SWTRITLWNRDLAPTPGANLYGSHPFYLALEDGGSAHGVFLLNSNAMDVV
LQPSPALSWRSTGGILDVYIFLGPEPKSVVQQYLDVVGYPFMPPYWGLGF
HLCRWGYSSTAITRQVVENMTRAHFPLDVQWNDLDYMDSRRDFTFNKDGF
RDFPAMVQELHQGGRRYMMIVDPAISSSGPAGSYRPYDEGLRRGVFITNE
TGQPLIGKVWPGSTAFPDFTNPTALAWWEDMVAEFHDQVPFDGMWIDMNE
PSNFIRGSEDGCPNNELENPPYVPGVVGGTLQAATICASSHQFLSTHYNL
HNLYGLTEAIASHRALVKARGTRPFVISRSTFAGHGRYAGHWTGDVWSSW
EQLASSVPEILQFNLLGVPLVGADVCGFLGNTSEELCVRWTQLGAFYPFM
RNHNSLLSLPQEPYSFSEPAQQAMRKALTLRYALLPHLYTLFHQAHVAGE
TVARPLFLEFPKDSSTWTVDHQLLWGEALLITPVLQAGKAEVTGYFPLGT
WYDLQTVPVEALGSLPPPPAAPREPAIHSEGQWVTLPAPLDTINVHLRAG
YIIPLQGPGLTTTESRQQPMALAVALTKGGEARGELFWDDGESLEVLERG
AYTQVIFLARNNTIVNELVRVTSEGAGLQLQKVTVLGVATAPQQVLSNGV
PVSNFTYSPDTKVLDICVSLLMGEQFLVSWC(SEQ ID NO: 697)

[0971] 69329

DIQMTQSPSSVSASVGDRVTITCRASQGISSWLAWYQQKPGKAPKLLIYA
ASSLQSGVPSRFSGSGSGTDFTLTISSLQPEDFATYYCQKANSFPYTFGQ
GTKLEIKGGGGSGGGGSGGGGSEVQLVESGGGLVQPGGSLRLSCAASGFT
FSNYWMTWVRQAPGKGLEWVANIKEDGSEKDYVDSVKGRFTISRDNAKNS
LYLQMNSLRGEDTAVYYCARDGEQLVDYYYYYVMDVWGQGTTVTVSSGGG
GSGGGGSAHPGRPRAVPTQCDVPPNSRFDCAPDKAITQEQCEARGCCYIP
AKQGLQGAQMGQPWCFFPPSYPSYKLENLSSSEMGYTATLTRTTPTFFPK
DILTLRLDVMMETENRLHFTIKDPANRRYEVPLETPHVHSRAPSPLYSVE
FSEEPFGVIVRRQLDGRVLLNTTVAPLFFADQFLQLSTSLPSQYITGLAE
HLSPLMLSTSWTRITLWNRDLAPTPGANLYGSHPFYLALEDGGSAHGVFL
LNSNAMDVVLQPSPALSWRSTGGILDVYIFLGPEPKSVVQQYLDVVGYPF
MPPYWGLGFHLCRWGYSSTAITRQVVENMTRAHFPLDVQWNDLDYMDSRR
DFTFNKDGFRDFPAMVQELHQGGRRYMMIVDPAISSSGPAGSYRPYDEGL
RRGVFITNETGQPLIGKVWPGSTAFPDFTNPTALAWWEDMVAEFHDQVPF
DGMWIDMNEPSNFIRGSEDGCPNNELENPPYVPGVVGGTLQAATICASSH
QFLSTHYNLHNLYGLTEAIASHRALVKARGTRPFVISRSTFAGHGRYAGH
WTGDVWSSWEQLASSVPEILQFNLLGVPLVGADVCGFLGNTSEELCVRWT
QLGAFYPFMRNHNSLLSLPQEPYSFSEPAQQAMRKALTLRYALLPHLYTL
FHQAHVAGETVARPLFLEFPKDSSTWTVDHQLLWGEALLITPVLQAGKAE
VTGYFPLGTWYDLQTVPVEALGSLPPPPAAPREPAIHSEGQWVTLPAPLD
TINVHLRAGYIIPLQGPGLTTTESRQQPMALAVALTKGGEARGELFWDDG
ESLEVLERGAYTQVIFLARNNTIVNELVRVTSEGAGLQLQKVTVLGVATA
PQQVLSNGVPVSNFTYSPDTKVLDICVSLLMGEQFLVSWC(SEQ ID NO
: 698)

[0972] 69331

DIQLTQSPSSLSASVGDRVTITCWASQGISSYLAWYQQKPGKAPKLLIYA
ASTLQSGVPSRFSGSGSGTEFTLTISSLQPEDFATYYCQQLNSYPLTFGG
GTKVEIKGGGGSGGGGSGGGGSQVQLVESGGGVVQPGRSLRLSCIASGFT
FSVYGIHWVRQAPGKGLEWMAVISHDGNIKHYADSVKGRFTISRDNSKNT
LYLQINSLRTEDTAVYYCAKDTWNSLDTFDIWGQGTMVTVSSGGGGSGGG
GSAHPGRPRAVPTQCDVPPNSRFDCAPDKAITQEQCEARGCCYIPAKQGL
QGAQMGQPWCFFPPSYPSYKLENLSSSEMGYTATLTRTTPTFFPKDILTL
RLDVMMETENRLHFTIKDPANRRYEVPLETPHVHSRAPSPLYSVEFSEEP
FGVIVRRQLDGRVLLNTTVAPLFFADQFLQLSTSLPSQYITGLAEHLSPL
MLSTSWTRITLWNRDLAPTPGANLYGSHPFYLALEDGGSAHGVFLLNSNA
MDVVLQPSPALSWRSTGGILDVYIFLGPEPKSVVQQYLDVVGYPFMPPYW
GLGFHLCRWGYSSTAITRQVVENMTRAHFPLDVQWNDLDYMDSRRDFTFN
KDGFRDFPAMVQELHQGGRRYMMIVDPAISSSGPAGSYRPYDEGLRRGVF
ITNETGQPLIGKVWPGSTAFPDFTNPTALAWWEDMVAEFHDQVPFDGMWI
DMNEPSNFIRGSEDGCPNNELENPPYVPGVVGGTLQAATICASSHQFLST
HYNLHNLYGLTEAIASHRALVKARGTRPFVISRSTFAGHGRYAGHWTGDV
WSSWEQLASSVPEILQFNLLGVPLVGADVCGFLGNTSEELCVRWTQLGAF
YPFMRNHNSLLSLPQEPYSFSEPAQQAMRKALTLRYALLPHLYTLFHQAH
VAGETVARPLFLEFPKDSSTWTVDHQLLWGEALLITPVLQAGKAEVTGYF
PLGTWYDLQTVPVEALGSLPPPPAAPREPAIHSEGQWVTLPAPLDTINVH
LRAGYIIPLQGPGLTTTESRQQPMALAVALTKGGEARGELFWDDGESLEV
LERGAYTQVIFLARNNTIVNELVRVTSEGAGLQLQKVTVLGVATAPQQVL
SNGVPVSNFTYSPDTKVLDICVSLLMGEQFLVSWC(SEQ ID NO: 699
)

[0973] 69332

AIQMTQSPSSLSASVGDRVTITCRASQGIRNDLGWYQQKPGKAPKLLIYA
ASTLQSGVPSRFSGSGSGTDFTLTISSLQPEDFATYYCLQDYNYPFTFGP
GTKVDIKGGGGSGGGGSGGGGSQVTLRESGPALVKPSQTLTLTCTFSGFS
LNTYGMFVSWIRQPPGKALEWLAHIHWDDDKYYSTSLKTRLTISKDTSKN
QVVLTMTNMDPVDTATYYCARGHNNLNYIIHWGQGTLVTVSSGGGGSGGG
GSAHPGRPRAVPTQCDVPPNSRFDCAPDKAITQEQCEARGCCYIPAKQGL
QGAQMGQPWCFFPPSYPSYKLENLSSSEMGYTATLTRTTPTFFPKDILTL
RLDVMMETENRLHFTIKDPANRRYEVPLETPHVHSRAPSPLYSVEFSEEP
FGVIVRRQLDGRVLLNTTVAPLFFADQFLQLSTSLPSQYITGLAEHLSPL
MLSTSWTRITLWNRDLAPTPGANLYGSHPFYLALEDGGSAHGVFLLNSNA
MDVVLQPSPALSWRSTGGILDVYIFLGPEPKSVVQQYLDVVGYPFMPPYW
GLGFHLCRWGYSSTAITRQVVENMTRAHFPLDVQWNDLDYMDSRRDFTFN
KDGFRDFPAMVQELHQGGRRYMMIVDPAISSSGPAGSYRPYDEGLRRGVF
ITNETGQPLIGKVWPGSTAFPDFTNPTALAWWEDMVAEFHDQVPFDGMWI
DMNEPSNFIRGSEDGCPNNELENPPYVPGVVGGTLQAATICASSHQFLST
HYNLHNLYGLTEAIASHRALVKARGTRPFVISRSTFAGHGRYAGHWTGDV
WSSWEQLASSVPEILQFNLLGVPLVGADVCGFLGNTSEELCVRWTQLGAF
YPFMRNHNSLLSLPQEPYSFSEPAQQAMRKALTLRYALLPHLYTLFHQAH
VAGETVARPLFLEFPKDSSTWTVDHQLLWGEALLITPVLQAGKAEVTGYF
PLGTWYDLQTVPVEALGSLPPPPAAPREPAIHSEGQWVTLPAPLDTINVH
LRAGYIIPLQGPGLTTTESRQQPMALAVALTKGGEARGELFWDDGESLEV
LERGAYTQVIFLARNNTIVNELVRVTSEGAGLQLQKVTVLGVATAPQQVL
SNGVPVSNFTYSPDTKVLDICVSLLMGEQFLVSWC(SEQ ID NO: 700
)

[0974] 69340

EIVLTQSPATLSLSPGERATLSCRASQSVSSYLAWYQQKPGQAPRLLIHD
VSNRATGIPARFSGSGSGTDFTLTISSLEPEDFVVYYCQQRSDWPITFGQ
GTRLEIKGGGGSGGGGSGGGGSEVQLVESGGGLVQPGRSLRLSCAASGFT
FDDKAMHWVRQVPGKGLEWISGISWNSGTIGYADSVKGRFIISRDNAKNS
LYLQMNSLRAEDTALYYCAKDGDTSGWYWYGLDVWGQGTTVTVSSGGGGS
GGGGSAHPGRPRAVPTQCDVPPNSRFDCAPDKAITQEQCEARGCCYIPAK
QGLQGAQMGQPWCFFPPSYPSYKLENLSSSEMGYTATLTRTTPTFFPKDI
LTLRLDVMMETENRLHFTIKDPANRRYEVPLETPHVHSRAPSPLYSVEFS
EEPFGVIVRRQLDGRVLLNTTVAPLFFADQFLQLSTSLPSQYITGLAEHL
SPLMLSTSWTRITLWNRDLAPTPGANLYGSHPFYLALEDGGSAHGVFLLN
SNAMDVVLQPSPALSWRSTGGILDVYIFLGPEPKSVVQQYLDVVGYPFMP
PYWGLGFHLCRWGYSSTAITRQVVENMTRAHFPLDVQWNDLDYMDSRRDF
TFNKDGFRDFPAMVQELHQGGRRYMMIVDPAISSSGPAGSYRPYDEGLRR
GVFITNETGQPLIGKVWPGSTAFPDFTNPTALAWWEDMVAEFHDQVPFDG
MWIDMNEPSNFIRGSEDGCPNNELENPPYVPGVVGGTLQAATICASSHQF
LSTHYNLHNLYGLTEAIASHRALVKARGTRPFVISRSTFAGHGRYAGHWT
GDVWSSWEQLASSVPEILQFNLLGVPLVGADVCGFLGNTSEELCVRWTQL
GAFYPFMRNHNSLLSLPQEPYSFSEPAQQAMRKALTLRYALLPHLYTLFH
QAHVAGETVARPLFLEFPKDSSTWTVDHQLLWGEALLITPVLQAGKAEVT
GYFPLGTWYDLQTVPVEALGSLPPPPAAPREPAIHSEGQWVTLPAPLDTI
NVHLRAGYIIPLQGPGLTTTESRQQPMALAVALTKGGEARGELFWDDGES
LEVLERGAYTQVIFLARNNTIVNELVRVTSEGAGLQLQKVTVLGVATAPQ
QVLSNGVPVSNFTYSPDTKVLDICVSLLMGEQFLVSWC(SEQ ID NO:
701)

[0975] 69348

DIQMTQSPSSLSASVGDRVTITCRASQSIRNVLGWFQQKPGKAPQRLIYA
ASSLQSGVPSRFSGSGSGTEFTLTISSLQPEDFATYYCLQHNFYPLTFGG
GTKVEIKGGGGSGGGGSGGGGSQVQLVESGGGVVQPGRSLRLSCAASGFT
FTTYGMHWVRQAPGKGLEWVAVIWYDGSNKYYGDSVKGRFTISRDNSKNT
LYLQMNSLRVDDTAVYYCTRTHGYTRSSDGFDYWGQGTLVTVSSGGGGSG
GGGSAHPGRPRAVPTQCDVPPNSRFDCAPDKAITQEQCEARGCCYIPAKQ
GLQGAQMGQPWCFFPPSYPSYKLENLSSSEMGYTATLTRTTPTFFPKDIL
TLRLDVMMETENRLHFTIKDPANRRYEVPLETPHVHSRAPSPLYSVEFSE
EPFGVIVRRQLDGRVLLNTTVAPLFFADQFLQLSTSLPSQYITGLAEHLS
PLMLSTSWTRITLWNRDLAPTPGANLYGSHPFYLALEDGGSAHGVFLLNS
NAMDVVLQPSPALSWRSTGGILDVYIFLGPEPKSVVQQYLDVVGYPFMPP
YWGLGFHLCRWGYSSTAITRQVVENMTRAHFPLDVQWNDLDYMDSRRDFT
FNKDGFRDFPAMVQELHQGGRRYMMIVDPAISSSGPAGSYRPYDEGLRRG
VFITNETGQPLIGKVWPGSTAFPDFTNPTALAWWEDMVAEFHDQVPFDGM
WIDMNEPSNFIRGSEDGCPNNELENPPYVPGVVGGTLQAATICASSHQFL
STHYNLHNLYGLTEAIASHRALVKARGTRPFVISRSTFAGHGRYAGHWTG
DVWSSWEQLASSVPEILQFNLLGVPLVGADVCGFLGNTSEELCVRWTQLG
AFYPFMRNHNSLLSLPQEPYSFSEPAQQAMRKALTLRYALLPHLYTLFHQ
AHVAGETVARPLFLEFPKDSSTWTVDHQLLWGEALLITPVLQAGKAEVTG
YFPLGTWYDLQTVPVEALGSLPPPPAAPREPAIHSEGQWVTLPAPLDTIN
VHLRAGYIIPLQGPGLTTTESRQQPMALAVALTKGGEARGELFWDDGESL
EVLERGAYTQVIFLARNNTIVNELVRVTSEGAGLQLQKVTVLGVATAPQQ
VLSNGVPVSNFTYSPDTKVLDICVSLLMGEQFLVSWC(SEQ ID NO: 7
02);

MHRPRRRGTRPPPLALLAALLLAARGADADIQMTQSPSSVSASVGDRVTI
TCRASQGIASWLAWYQQKPGKAPELLIYAASSLQGGVPSRFSGSGSGTDF
TLTISSLQPEDFAIYYCQQANYFPWTFGQGTKVEIKGGGGSGGGGSGGGG
SQITLKESGPTLVKPTQTLTLTCTFSGFSLSTSGVGVVWIRQPPGKALEW
LALIYWNDHKRYSPSLGSRLTITKDTSKNQVVLTMTNMDPVDTATYYCAH
YSGSYSYYYYGLDVWGQGTTVTVSSGGGGSGGGGSAHPGRPRAVPTQCDV
PPNSRFDCAPDKAITQEQCEARGCCYIPAKQGLQGAQMGQPWCFFPPSYP
SYKLENLSSSEMGYTATLTRTTPTFFPKDILTLRLDVMMETENRLHFTIK
DPANRRYEVPLETPHVHSRAPSPLYSVEFSEEPFGVIVRRQLDGRVLLNT
TVAPLFFADQFLQLSTSLPSQYITGLAEHLSPLMLSTSWTRITLWNRDLA
PTPGANLYGSHPFYLALEDGGSAHGVFLLNSNAMDVVLQPSPALSWRSTG
GILDVYIFLGPEPKSVVQQYLDVVGYPFMPPYWGLGFHLCRWGYSSTAIT
RQVVENMTRAHFPLDVQWNDLDYMDSRRDFTFNKDGFRDFPAMVQELHQG
GRRYMMIVDPAISSSGPAGSYRPYDEGLRRGVFITNETGQPLIGKVWPGS
TAFPDFTNPTALAWWEDMVAEFHDQVPFDGMWIDMNEPSNFIRGSEDGCP
NNELENPPYVPGVVGGTLQAATICASSHQFLSTHYNLHNLYGLTEAIASH
RALVKARGTRPFVISRSTFAGHGRYAGHWTGDVWSSWEQLASSVPEILQF
NLLGVPLVGADVCGFLGNTSEELCVRWTQLGAFYPFMRNHNSLLSLPQEP
YSFSEPAQQAMRKALTLRYALLPHLYTLFHQAHVAGETVARPLFLEFPKD
SSTWTVDHQLLWGEALLITPVLQAGKAEVTGYFPLGTWYDLQTVPVEALG
SLPPPPAAPREPAIHSEGQWVTLPAPLDTINVHLRAGYIIPLQGPGLTTT
ESRQQPMALAVALTKGGEARGELFWDDGESLEVLERGAYTQVIFLARNNT
IVNELVRVTSEGAGLQLQKVTVLGVATAPQQVLSNGVPVSNFTYSPDTKV
LDICVSLLMGEQFLVSWC(SEQ ID NO: 703;

optionally lacking the N-terminal MHRPRRRGTRPPPLALLAALLLAARGADA (SEQ ID NO: 709) sequence);

MHRPRRRGTRPPPLALLAALLLAARGADADIQMTQSPSSLSASVGDRVTI
TCRASQSISSYLNWYQQKPGKAPKLLIYAASSLQSGVPSRFSGSGSGTDF
TLTISSLQPEDFATYYCQQSYSTPPITFGQGTRLEIKGGGGSGGGGSGGG
GSQVQLVESGGGVVQPGRSLRLSCAASGFPFSNYVMYWVRQAPGKGLEWV
ALIFFDGKKNYHADSVKGRFTITRDNSKNMLYLQMNSLRPEDAAVYYCAK
IHCPNGVCYKGYYGMDVWGQGTTVTVSSGGGGSGGGGSAHPGRPRAVPTQ
CDVPPNSRFDCAPDKAITQEQCEARGCCYIPAKQGLQGAQMGQPWCFFPP
SYPSYKLENLSSSEMGYTATLTRTTPTFFPKDILTLRLDVMMETENRLHF
TIKDPANRRYEVPLETPHVHSRAPSPLYSVEFSEEPFGVIVRRQLDGRVL
LNTTVAPLFFADQFLQLSTSLPSQYITGLAEHLSPLMLSTSWTRITLWNR
DLAPTPGANLYGSHPFYLALEDGGSAHGVFLLNSNAMDVVLQPSPALSWR
STGGILDVYIFLGPEPKSVVQQYLDVVGYPFMPPYWGLGFHLCRWGYSST
AITRQVVENMTRAHFPLDVQWNDLDYMDSRRDFTFNKDGFRDFPAMVQEL
HQGGRRYMMIVDPAISSSGPAGSYRPYDEGLRRGVFITNETGQPLIGKVW
PGSTAFPDFTNPTALAWWEDMVAEFHDQVPFDGMWIDMNEPSNFIRGSED
GCPNNELENPPYVPGVVGGTLQAATICASSHQFLSTHYNLHNLYGLTEAI
ASHRALVKARGTRPFVISRSTFAGHGRYAGHWTGDVWSSWEQLASSVPEI
LQFNLLGVPLVGADVCGFLGNTSEELCVRWTQLGAFYPFMRNHNSLLSLP
QEPYSFSEPAQQAMRKALTLRYALLPHLYTLFHQAHVAGETVARPLFLEF
PKDSSTWTVDHQLLWGEALLITPVLQAGKAEVTGYFPLGTWYDLQTVPVE
ALGSLPPPPAAPREPAIHSEGQWVTLPAPLDTINVHLRAGYIIPLQGPGL
TTTESRQQPMALAVALTKGGEARGELFWDDGESLEVLERGAYTQVIFLAR
NNTIVNELVRVTSEGAGLQLQKVTVLGVATAPQQVLSNGVPVSNFTYSPD
TKVLDICVSLLMGEQFLVSWC(SEQ ID NO: 704;

optionally lacking the N-terminal MHRPRRRGTRPPPLALLAALLLAARGADA (SEQ ID NO: 709) sequence);

MHRPRRRGTRPPPLALLAALLLAARGADADIQMTQSPSSLSASVGDRVTI
TCRASQSISSYLNWYQQKPGKAPKLLIYAASSLQSGVPSRFSGSGSGTDF
TLTISSLQPEDFATYYCQQSYSTPPITFGQGTRLEIKGGGGSGGGGSGGG
GSEVQLVESGGGLVQPGGSLRLSCAASGFTFNIFEMNWVRQAPGKGLEWI
SYISSRGTTTYYADSVRGRFTISRDNAKNSLYLQMNSLRAEDTAVYYCAR
DYEATIPFDFWGQGTLVTVSSGGGGSGGGGSAHPGRPRAVPTQCDVPPNS
RFDCAPDKAITQEQCEARGCCYIPAKQGLQGAQMGQPWCFFPPSYPSYKL
ENLSSSEMGYTATLTRTTPTFFPKDILTLRLDVMMETENRLHFTIKDPAN
RRYEVPLETPHVHSRAPSPLYSVEFSEEPFGVIVRRQLDGRVLLNTTVAP
LFFADQFLQLSTSLPSQYITGLAEHLSPLMLSTSWTRITLWNRDLAPTPG
ANLYGSHPFYLALEDGGSAHGVFLLNSNAMDVVLQPSPALSWRSTGGILD
VYIFLGPEPKSVVQQYLDVVGYPFMPPYWGLGFHLCRWGYSSTAITRQVV
ENMTRAHFPLDVQWNDLDYMDSRRDFTFNKDGFRDFPAMVQELHQGGRRY
MMIVDPAISSSGPAGSYRPYDEGLRRGVFITNETGQPLIGKVWPGSTAFP
DFTNPTALAWWEDMVAEFHDQVPFDGMWIDMNEPSNFIRGSEDGCPNNEL
ENPPYVPGVVGGTLQAATICASSHQFLSTHYNLHNLYGLTEAIASHRALV
KARGTRPFVISRSTFAGHGRYAGHWTGDVWSSWEQLASSVPEILQFNLLG
VPLVGADVCGFLGNTSEELCVRWTQLGAFYPFMRNHNSLLSLPQEPYSFS
EPAQQAMRKALTLRYALLPHLYTLFHQAHVAGETVARPLFLEFPKDSSTW
TVDHQLLWGEALLITPVLQAGKAEVTGYFPLGTWYDLQTVPVEALGSLPP
PPAAPREPAIHSEGQWVTLPAPLDTINVHLRAGYIIPLQGPGLTTTESRQ
QPMALAVALTKGGEARGELFWDDGESLEVLERGAYTQVIFLARNNTIVNE
LVRVTSEGAGLQLQKVTVLGVATAPQQVLSNGVPVSNFTYSPDTKVLDIC
VSLLMGEQFLVSWC(SEQ ID NO: 705;

optionally lacking the N-terminal MHRPRRRGTRPPPLALLAALLLAARGADA (SEQ ID NO: 709) sequence);

MHRPRRRGTRPPPLALLAALLLAARGADADIQMTQSPSSLSASVGDRVTI
TCRASQSISSYLNWYQQKPGKAPKLLIYAASSLQSGVPSRFSGSGSGTDF
TLTISSLQPEDFATYYCQQSYSTPPITFGQGTRLEIKGGGGSGGGGSGGG
GSEVQLVESGGGLVQPGRSLRLSCAASGFTFDDYAMNWVRQAPGKGLEWV
SGISWSSGSMDYADSVKGRFTISRDNAKNSLYLQMNSLRTEDTALYYCAK
AREVGDYYGMDVWGQGTTVTVSSGGGGSGGGGSAHPGRPRAVPTQCDVPP
NSRFDCAPDKAITQEQCEARGCCYIPAKQGLQGAQMGQPWCFFPPSYPSY
KLENLSSSEMGYTATLTRTTPTFFPKDILTLRLDVMMETENRLHFTIKDP
ANRRYEVPLETPHVHSRAPSPLYSVEFSEEPFGVIVRRQLDGRVLLNTTV
APLFFADQFLQLSTSLPSQYITGLAEHLSPLMLSTSWTRITLWNRDLAPT
PGANLYGSHPFYLALEDGGSAHGVFLLNSNAMDVVLQPSPALSWRSTGGI
LDVYIFLGPEPKSVVQQYLDVVGYPFMPPYWGLGFHLCRWGYSSTAITRQ
VVENMTRAHFPLDVQWNDLDYMDSRRDFTFNKDGFRDFPAMVQELHQGGR
RYMMIVDPAISSSGPAGSYRPYDEGLRRGVFITNETGQPLIGKVWPGSTA
FPDFTNPTALAWWEDMVAEFHDQVPFDGMWIDMNEPSNFIRGSEDGCPNN
ELENPPYVPGVVGGTLQAATICASSHQFLSTHYNLHNLYGLTEAIASHRA
LVKARGTRPFVISRSTFAGHGRYAGHWTGDVWSSWEQLASSVPEILQFNL
LGVPLVGADVCGFLGNTSEELCVRWTQLGAFYPFMRNHNSLLSLPQEPYS
FSEPAQQAMRKALTLRYALLPHLYTLFHQAHVAGETVARPLFLEFPKDSS
TWTVDHQLLWGEALLITPVLQAGKAEVTGYFPLGTWYDLQTVPVEALGSL
PPPPAAPREPAIHSEGQWVTLPAPLDTINVHLRAGYIIPLQGPGLTTTES
RQQPMALAVALTKGGEARGELFWDDGESLEVLERGAYTQVIFLARNNTIV
NELVRVTSEGAGLQLQKVTVLGVATAPQQVLSNGVPVSNFTYSPDTKVLD
ICVSLLMGEQFLVSWC(SEQ ID NO: 706;

optionally lacking the N-terminal MHRPRRRGTRPPPLALLAALLLAARGADA (SEQ ID NO: 709) sequence)

[0976] In order to validate the anti-human TfR antibodies that were screened for binding in vitro, we performed in vivo mouse studies in Tfrc^{hum/hum} knock-in mice to evaluate blood-brain-barrier (BBB) crossing. Eleven clones that had mature hGAA protein in brain homogenate detected by western blot were selected from this first screen of 31 antibodies.

[0977] GAA fusions by hydrodynamic delivery (HDD). Three-month-old human TFRC knock-in mice were injected with DNA plasmids expressing the various anti-hTfR antibodies in the anti-hTfRscfv:2xG4S:hGAA format under the liver-specific mouse TTR promoter. Mice received 50 µg of DNA in 0.9% sterile saline diluted to 10% of the mouse’s body weight (0.1 mL/g body weight). 48 hours post-injection, tissues were dissected from mice immediately after sacrifice by CO₂ asphyxiation, snap frozen in liquid nitrogen, and stored at -80° C.

[0978] Tissue lysates were prepared by lysis in RIPA buffer with protease inhibitors (1861282, Thermo Fisher, Waltham, MA, USA). Tissue lysates were homogenized with a bead homogenizer (FastPrep5, MP Biomedicals, Santa Ana, CA, USA). Cells or tissue lysates were run on SDS-PAGE gels using the Novex system (LifeTech Thermo, XPO4200BOX, LC2675, LC3675, LC2676). Gels were transferred to low-fluorescence polyvinylidene fluoridev (PVDF) membrane (IPFL07810, LI-COR, Lincoln, NE, USA) and stained with Revert 700 Total Protein Stain (TPS; 926-11010 LI-COR, Lincoln, NE, USA), followed by blocking with Odyssey blocking buffer (927-500000, LI-COR, Lincoln, NE, USA) in Tris buffer saline with 0.1% Tween 20 and staining with antibodies against GAA (ab137068, Abcam, Cambridge, MA, USA), or anti-GAPDH (ab9484, Abcam, Cambridge, MA, USA) and the appropriate secondary (926-32213 or 925-68070, LI-COR, Lincoln, NE, USA). Blots were imaged with a LI-COR Odyssey CLx.

[0979] Protein band intensity was quantified in LI-COR Image Studio software. The quantification of the mature 77 kDa GAA band for each sample was determined by first normalizing to the lane’s TPS signal, then normalizing to GAA levels in the serum (loading control and liver expression control, respectively). Values were then compared to the positive control group anti-mouse TfRscfv:hGAA in Wt mice, and negative control group anti-mTfRscfv:hGAA in Tfrc^{hum/hum} mice (FIGS. 18A-18C, Table 31). The 8D3 scFv (anti-mouse TfR scFv) has the heavy chain amino acid sequence:

EVQLVESGGGLVQPGNSLTLSCVASGFTFSNYGMHWIRQAPKKGLEWIAM
IYYDSSKMNYADTVKGRFTISRDNSKNTLYLEMNSLRSEDTAMYYCAVPT
SHYVVDVWGQGVSVTVSS (SEQ ID NO: 536),

and the light chain amino acid sequence:

DIQMTQSPASLSASLEEIVTITCQASQDIGNWLAWYQQKPGKSPQLLIYG
ATSLADGVPSRFSGSRSGTQFSLKISRVQVEDIGIYYCLQAYNTPWTFGG
GTKLELK (SEQ ID NO: 537).

TABLE 31

Quantification of mature hGAA protein in brain homogenate from mice treated HDD with anti-hTfRscfv:hGAA plasmids

| Treatment group | Genotype | Mature hGAA protein in brain (normalized to positive control) |
|---|---|---|
| anti-mTfRscfv:hGAA (positive control) | Wt | 1.00±0.43^{∗} |
| anti-mTfRscfv:hGAA (negative control) | Tfrc^{hum/hum} | 0.02±0.03 |
| 69261scfv:hGAA | Tfrc^{hum/hum} | 0.67±0.50 |
| 69307scfv:hGAA | Tfrc^{hum/hum} | 1.08±0.19 |
| 69323scfv:hGAA | Tfrc^{hum/hum} | 0.91±0.46 |
| 69329scfv:hGAA | Tfrc^{hum/hum} | 0.65±0.13 |
| 69340scfv:hGAA | Tfrc^{hum/hum} | 0.55±0.58 |
| 69348scfv:hGAA | Tfrc^{hum/hum} | 0.50±0.05 |
| 12795scfv:hGAA | Tfrc^{hum/hum} | 0.27±0.20 |
| 12798scfv:hGAA | Tfrc^{hum/hum} | 0.72±0.42 |
| 12799scfv:hGAA | Tfrc^{hum/hum} | 1.05±0.51^{∗} |
| 12801scfv:hGAA | Tfrc^{hum/hum} | 0.49±0.18 |
| 12802scfv:hGAA | Tfrc^{hum/hum} | 0.29±0.27 |
| 12839scfv:hGAA | Tfrc^{hum/hum} | 1.29±0.27^{∗∗} |
| 12841scfv:hGAA | Tfrc^{hum/hum} | 1.72±0.06^{∗∗∗} |
| 12843scfv:hGAA | Tfrc^{hum/hum} | 1.79±0.85^{∗∗∗} |
| 12845scfv:hGAA | Tfrc^{hum/hum} | 3.08±0.92^{∗∗∗} |
| 12847scfv:hGAA | Tfrc^{hum/hum} | 1.24±0.30 |
| 12848scfv:hGAA | Tfrc^{hum/hum} | 0.59±0.16 |
| 12850scfv:hGAA | Tfrc^{hum/hum} | 0.47±0.05 |

[0980] Data were quantified from western blot as arbitrary units (FIGS. 18A-18C). All values are mean ± SD, n=3-6 per group. One Way ANOVA vs. negative control anti-mTfRscfv:hGAA in Tfrc^{hum/hum} mice; ^{∗}p<0.05; ^{∗∗}p<0.005; ^{∗∗∗}p<0.0001.

[0981] Capillary depletion of brain samples following HDD of anti-hTfRscfv:hGAA plasmids. Selected anti-hTfRscfv:hGAA from Table 31 were tested in a secondary screen in Tfrc^{hum} mice to determine whether hGAA was present in the brain parenchyma, and not trapped in the BBB endothelial cells. We selected four scFvs (12799, 12839, 12843, and 12847) from this screen based on mature hGAA in the parenchyma fraction on western blot, as well as high affinity to cynomolgus TfR.

[0982] Three-month-old animals were treated HDD as detailed above. 48 hours post-injection, mice were perfused with 30 mL 0.9% saline immediately after sacrifice by CO₂ asphyxiation. A 2 mm coronal slice of cerebrum was taken between bregma and -2 mm bregma and placed in 700 µL physiological buffer (10 mM HEPES, 4 mM KCI, 2.8 mM CaCl₂, 1 mM MgSO₄, 1 mM NaH₂PO₄, 10 mM D-glucose in 0.9% saline pH 7.4) on ice. Brain slices were gently homogenized on ice with a glass dounce homogenizer. An equivalent volume of 26% dextran (MW 70,000 Da) in physiological buffer was added (final 13% dextran) and homogenized 10 more strokes. Parenchyma (supernatant) and endothelial (pellet) fractions were separated by centrifugation at 5,400 g for 15 min at 4° C. Anti-hGAA western blot was performed on fractions as detailed above (FIG. 19, Table 32). Blots were also probed with anti-CD31 endothelial marker (Abcam ab182982).

TABLE 32

Quantification of mature hGAA protein in brain parenchyma fractions and BBB endothelial fractions of mice treated HDD with anti-hTfRscfv:hGAA plasmids

| Treatment group | Genotype | Mature hGAA protein in brain parenchyma (normalized to positive control) | Mature hGAA protein in brain endothelium (normalized to positive control) | Affinity to mfTfR (% of hTfR binding) |
|---|---|---|---|---|
| anti-mTfRscfv:hGAA (positive control) | Wt | 1.00 | 5.82 | ND |
| anti-mTfRscfv:hGAA (negative control) | Tfrc^{hum/hum} | 0.00 | 0.01 | ND |
| 69307scfv:hGAA | Tfrc^{hum/hum} | 1.24 | 10.73 | 0% |
| 69323scfv:hGAA | Tfrc^{hum/hum} | 0.62 | 4.18 | 7% |
| 12798scfv:hGAA | Tfrc^{hum/hum} | 0.91 | 8.37 | 34% |
| 12799scfv:hGAA | Tfrc^{hum/hum} | 0.44 | 3.99 | 126% |
| 12839scfv:hGAA | Tfrc^{hum/hum} | 0.05 | 0.84 | 78% |
| 12841scfv:hGAA | Tfrc^{hum/hum} | 0.78 | 4.23 | 8% |
| 12843scfv:hGAA | Tfrc^{hum/hum} | 1.13 | 12.99 | 75% |
| 12845scfv:hGAA | Tfrc^{hum/hum} | 2.04 | 13.06 | 25% |
| 12847scfv:hGAA | Tfrc^{hum/hum} | 0.60 | 4.96 | 102% |
| 12848scfv:hGAA | Tfrc^{hum/hum} | 0.17 | 1.24 | 29% |
| 12850scfv:hGAA | Tfrc^{hum/hum} | 0.22 | 2.25 | 13% |

[0983] hGAA protein was quantified from western blot as arbitrary units (FIG. 19). n=1 per group. Affinity to cynomolgus macaque TfR Luminex data, calculated as percent of binding to hTfR: (mfTfR binding ÷ hTfR binding) × 100.

TABLE 33

Quantification of hGAA protein in quadricep of mice treated HDD with anti-hTfRscfv:hGAA plasmids

| Treatment group | Genotype | hGAA protein in quadricep (normalized to positive control) |
|---|---|---|
| Saline (vehicle) | Tfrc^{hum/hum} | 0.38±0.25 |
| anti-mTfRscfv:hGAA (positive control) | Wt | 1.07±0.27 |
| anti-mTfRscfv:hGAA (negative control) | Tfrc^{hum/hum} | 0.56±0.17 |
| 69307scfv:hGAA | Tfrc^{hum/hum} | 0.58±0.18 |
| 69323scfv:hGAA | Tfrc^{hum/hum} | 1.10±0.19 |
| 12798scfv:hGAA | Tfrc^{hum/hum} | 1.33±0.56 |
| 12799scfv:hGAA | Tfrc^{hum/hum} | 0.67±0.18 |
| 12839scfv:hGAA | Tfrc^{hum/hum} | 1.80±0.18 |
| 12841scfv:hGAA | Tfrc^{hum/hum} | 1.15±0.12 |
| 12843scfv:hGAA | Tfrc^{hum/hum} | 1.78±0.43 |
| 12845scfv:hGAA | Tfrc^{hum/hum} | 1.70±1.33 |
| 12847scfv:hGAA | Tfrc^{hum/hum} | 7.74±9.42 |
| 12848scfv:hGAA | Tfrc^{hum/hum} | 0.82±0.18 |
| 12850scfv:hGAA | Tfrc^{hum/hum} | 0.76±0.34 |

[0984] Data were quantified from western blot as arbitrary units (FIG. 19). All values are mean ± SD, n=2-4 per group.

[0985] Capillary depletion of mouse brain samples following liver-depot AAV8 anti-hTfRscfv:hGAA treatment. To confirm our HDD screen findings in a more long-term treatment model, we treated Tfrc^{hum} mice with selected anti-hTfRscfv:GAA delivered as episomal liver depot AAV8 anti-hTfRscfv:GAA under the TTR promoter. We found that all 4 anti-hTfRscfv:GAA delivered mature hGAA to the brain parenchyma when delivered as AAV8.

[0986] AAVproduction and in vivo transduction. Recombinant AAV8 (AAV2/8) was produced in HEK293 cells. Cells were transfected with three plasmids encoding adenovirus helper genes, AAV8 rep and cap genes, and recombinant AAV genomes containing transgenes flanked by AAV2 inverted terminal repeats (ITRs). On day 5, cells and medium were collected, centrifuged, and processed for AAV purification. Cell pellets were lysed by freeze-thaw and cleared by centrifugation. Processed cell lysates and medium were overlaid onto iodixanol gradients columns and centrifuged in an ultracentrifuge. Virus fractions were removed from the interface between the 40% and 60% iodixanol solutions and exchanged into 1xPBS with desalting columns. AAV vg were quantified by ddPCR. AAVs were diluted in PBS + 0.001% F-68 Pluronic immediately prior to injection. Three-month-old Tfrc^{hum} mice were dosed with 3e12 vg/kg body weight in a volume of ~100 µL. Mice were sacrificed 4 weeks post injection and capillary depletion and western blotting were performed as described above (FIG. 20, Table 34).

TABLE 34

Quantification of mature hGAA protein in brain parenchyma fractions and BBB endothelial fractions of mice treated with liver-depot AAV8 anti-hTfRscfv:hGAA

| Treatment group | Genotype | Mature hGAA protein in brain parenchyma (normalized to positive control) | Mature hGAA protein in brain endothelium (normalized to positive control) |
|---|---|---|---|
| anti-mTfRscfv:hGAA (positive control) | Wt | 1.00 | 1.00 |
| anti-mTfRscfv:hGAA (negative control) | Tfrc^{hum/hum} | 0.02 | 0.01 |
| 12799scfv:hGAA | Tfrc^{hum/hum} | 0.94 | 0.94 |
| 12839scfv:hGAA | Tfrc^{hum/hum} | 0.49 | 0.62 |
| 12843scfv:hGAA | Tfrc^{hum/hum} | 0.61 | 0.63 |
| 12847scfv:hGAA | Tfrc^{hum/hum} | 1.90 | 1.33 |

[0987] Data were quantified from western blot as arbitrary units (FIG. 20). n=1 per group.

[0988] Rescue of glycogen storage phenotype in Gaa^{-/-}/Tfrc^{hum} mice with AAV8 episomal liver depot anti-hTfRscfv:GAA. We tested four of the anti-hTfRscfv:GAA from the above experiment in Pompe disease model mice to determine whether hTfRscfv:GAA rescued the glycogen storage phenotype. We found that all four (12839, 12843, 12847, 12799) normalized glycogen to Wt levels.

[0989] AAV production and in vivo transduction were performed as above. Three-month-old Gaa^{-/-}/Tfrc^{hum} mice were dosed with 2e12 vg/kg AAV8. Tissues were harvested 4 weeks post-injection and flash-frozen as above. hGAA Western blot was performed as above (FIG. 21, Table 35).

[0990] Glycogen quantification (Table 36, FIGS. 22A-22C). Tissues were dissected from mice immediately after sacrifice by CO₂ asphyxiation, snap frozen in liquid nitrogen, and stored at -80° C. Tissues were lysed on a benchtop homogenizer with stainless steel beads in distilled water for glycogen measurements or RIPA buffer for protein analyses. Glycogen analysis lysates were boiled and centrifuged to clear debris. Glycogen measurements were performed fluorometrically with a commercial kit according to manufacturer’s instructions (K646, BioVision, Milpitas, CA, USA). All groups had normal iron homeostasis at 4 weeks post-injection (serum iron, TIBC, hepcidin, tissue iron, tissue transferrin).

TABLE 35

Quantification of hGAA protein in tissues of Gaa^{-/-}/Tfrc^{hum} mice treated with liver-depot AAV8 anti-hTfRscfv:hGAA

| Treatment group | n | Serum ^{∗} | Liver ^{∗} | Cerebrum ^{∗∗} | Cerebellum ^{∗∗} | Spinal Cord ^{∗∗} | Heart ^{∗∗} | Quadricep ^{∗∗} |
|---|---|---|---|---|---|---|---|---|
| Gaa^{-/-} Untreated | 1 | 0.00 | 0.02 | 0.00 | 0.00 | 0.00 | 0.02 | 0.01 |
| Gaa^{-/-} 12839scfv:hGAA | 3 | 2.42± 2.41 | 1.63± 0.96 | 0.14± 0.12 | 0.13± 0.12 | 0.19± 0.19 | 0.53± 0.52 | 0.14± 0.16 |
| Gaa^{-/-} 12843scfv:hGAA | 3 | 2.07± 1.35 | 2.23± 0.08 | 0.17± 0.07 | 0.11± 0.05 | 0.17± 0.09 | 0.49± 0.31 | 0.18± 0.06 |
| Gaa^{-/-} 12847scfv:hGAA | 3 | 1.56± 0.71 | 1.40± 0.13 | 0.25± 0.04 | 0.21± 0.09 | 0.42± 0.19 | 0.58± 0.17 | 0.19± 0.08 |

[0991] Data were quantified from western blot as arbitrary units (FIG. 21). All values are mean ± SD, n=1-3 per group. ^{∗}Total hGAA protein; ^{∗∗}Mature hGAA protein.

TABLE 36

Quantification of glycogen in tissues of Gaa^{-/-}/Tfrc^{hum} mice treated with liver-depot AAV8 anti-hTfRscfv:hGAA

| Treatment group | Cerebrum | Cerebellum | Spinal Cord | Heart | Quadricep | DRG |
|---|---|---|---|---|---|---|
| Wt Untreated | 0.06±0.04^{∗} | 0.01±0.04^{∗} | 0.05±0.05^{∗} | 0.08±0.02^{∗} | 0.34±0.19^{∗} | 0.018 |
| Gaa-/- Untreated | 2.34±0.58 | 2.51±0.38 | 3.08±0.23 | 25.30±6.06 | 13.05±0.98 | 2.58 |
| Gaa-/- 12839scfv:hGAA | 0.11±0.03^{∗} | 0.46±0.08^{∗} | 0.08±0.10^{∗} | 0.68±0.68^{∗} | 2.15±2.52^{∗} | |
| Gaa-/- 12843scfv:hGAA | 0.09±0.02^{∗} | 0.09±0.08^{∗} | 0.13±0.13^{∗} | 0.09±0.01^{∗} | 1.22±1.39^{∗} | |
| Gaa-/- 12847scfv:hGAA | 0.05±0.01^{∗} | 0.02±0.03^{∗} | 0.20±0.33^{∗} | 0.11±0.11^{∗} | 0.80±0.79^{∗} | 0.066 |
| Treatment group | Cerebrum | Cerebellum | Spinal Cord | Heart | Quadricep | |
| Wt Untreated | 0.043±0.016^{∗} | 0.023±0.008^{∗} | 0.05±0.093^{∗} | 0.083±0.022^{∗} | 0.247±0.045^{∗} | |
| Gaa-/- Untreated | 3.16±0.837 | 3.043±0.932 | 3.22±0.414 | 34.48±5.580 | 11.05±2.192 | |
| Gaa-/- 12799scfv:hGAA | 0.063±0.023^{∗} | 0.107±0.078^{∗} | 0.084±0.019^{∗} | 0.123±0.113^{∗} | 0.725±0.599^{∗} | |

[0992] All values are glycogen µg/mg tissue, mean ± SD, n=3-4 per group. One Way ANOVA ^{∗}p<0.0001 vs. Gaa^{-/-} Untreated group. For DRGs, a single value was generated from pooled lumbar DRGs from 5 mice per group.

[0993] Rescue of glycogen storage in brain and muscle in Gaa^{-/-}/Tfrc^{hum} mice with AAV8 episomal liver depot anti-hTfRscfv:GAA. We tested three selected anti-hTfRscfv:GAA (12799, 12843, and 12847) in Pompe disease model mice to determine whether hTfRscfv:GAA rescued the glycogen storage phenotype. In this experiment, we performed histology on brain and muscle sections to visualize glycogen in the tissues. We found that all three selected anti-hTfRscfv:GAA reduced glycogen staining in the brain and muscle. We selected 12847scfv:GAA for further analysis based on these data.

[0994] AAV production and in vivo transduction were performed as above. Three-month old Gaa^{-/-}/Tfrc^{hum} mice were dosed with 4e11 vg/kg AAV8. 4 weeks post-injection, tissues were frozen for glycogen analysis as above (Table 37). For histology, animals were perfused with saline (0.9% NaCl), and tissues were drop-fixed overnight in 10% Normal Buffered Formalin. Tissues were washed 3x in PBS and stored in PBS/0.01% sodium azide until embedding. Tissues were embedded in paraffin and 5um sections were cut from brain (coronal, -2 mm bregma) and quadricep (fiber cross-section). Sections were stained with Periodic Acid-Schiff and Hematoxylin using standard protocols (FIGS. 23A-23D).

TABLE 37

Quantification of glycogen in tissues of Gaa^{-/-}/Tfrc^{hum} mice treated with liver-depot AAV8 anti-hTfRscfv:hGAA

| Treatment group | Cerebellum | Quadricep |
|---|---|---|
| Wt Untreated | 0.02±0.03^{∗} | 0.55±0.10^{∗} |
| Gaa-/- Untreated | 1.91±0.26 | 12.19±3.02 |
| Gaa-/- 12799scfv:hGAA | 0.10±0.06^{∗} | 1.34±0.9^{∗} |
| Gaa-/- 12843scfv:hGAA | 0.09±0.06^{∗} | 1.09±1.27^{∗} |
| Gaa-/- 12847scfv:hGAA | 0.07±0.06^{∗} | 0.72±0.64^{∗} |

[0995] All values are glycogen µg/mg tissue, mean ± SD, n=5-8 per group. One Way ANOVA ^{∗}p<0.0001 vs. Gaa^{-/-} Untreated group.

[0996] Insertion of anti-hTfR 12847scfv:GAA in Gaa^{-/-}/Tfrc^{hum} mice. We tested the selected anti-hTfR 12847scfv:GAA in Pompe disease model mice by albumin insertion to determine whether we could replicate the results we saw with episomal AAV8 liver depot expression. Albumin insertion of 12847scfv:GAA delivered mature hGAA protein to the brain and muscle, and rescued the glycogen storage phenotype in Gaa^{-/-}/Tfrc^{hum} mice. These data were produced with the native 12847scfv:GAA sequence that is not optimized.

[0997] We compared 12847scfv:GAA to the muscle-targeted anti-hCD63scfv:GAA in Gaa^{-/-} /Cd63^{hum} mice. In this particular experiment, the expression of anti-hCD63scfv:GAA was lower than usual and does not deliver as much GAA protein to the muscle nor normalize glycogen as it usually does. This may make it appear that anti-hCD63scfv:GAA is less effective than 12847scfv:GAA in the muscle but in most experiments we found them to be comparable in the muscle.

[0998] AAVproduction. A promoterless AAV genome plasmid was created with the 12847scfv:GAA sequence and the mouse albumin exon 1 splice acceptor site at the 3′ end. Recombinant AAV8 (AAV2/8) was produced in HEK293 cells. Cells were transfected with three plasmids encoding adenovirus helper genes, AAV8 rep and cap genes, and recombinant AAV genomes containing transgenes flanked by AAV2 inverted terminal repeats (ITRs). On day 5, cells and medium were collected, centrifuged, and processed for AAV purification. Cell pellets were lysed by freeze-thaw and cleared by centrifugation. Processed cell lysates and medium were overlaid onto iodixanol gradients columns and centrifuged in an ultracentrifuge. Virus fractions were removed from the interface between the 40% and 60% iodixanol solutions and exchanged into 1xPBS with desalting columns. AAV vg were quantified by ddPCR.

[0999] In vivo CRISPR/Cas9 insertion into the albumin locus. 3-month old Gaa^{-/-}/Tfrc^{hum} mice were dosed via tail vein injection with 3e12 vg/kg AAV8 12847scfv:GAA and 3 mg/kg LNP G666/Cas9 mRNA diluted in PBS + 0.001% F-68 Pluronic. Mice were sacrificed 3 weeks post injection. Negative control mice received insertion AAV8 without LNP. Positive control mice were dosed with 4e11 vg/kg episomal liver depot AAV8 12847scfv:GAA under the TTR promoter (phenotype rescue data previously shown). Tissues were dissected from mice immediately after sacrifice by CO₂ asphyxiation, snap frozen in liquid nitrogen, and stored at -80° C. Blood was collected from mice by cardiac puncture immediately following CO₂ asphyxiation and serum was separated using serum separator tubes (BD Biosciences, 365967).

TABLE 38

Treatment Groups and Controls

| | | |
|---|---|---|
| Treatment group | Genotype | Function |
| Wt Untreated | Tfrc^{hum} | Normal untreated mouse control |
| Gaa^{-/-} untreated | Gaa^{-/-}/ Tfrc^{hum} | Untreated Pompe disease mouse |
| Gaa^{-/-}insertion AAV only | Gaa^{-/-}/ Tfrc^{hum} | Negative control for insertion (no Cas9/gRNA delivered) |
| Gaa^{-/-}episomal AAV8 TTR 12847scfv:hGAA | Gaa^{-/-}/ Tfrc^{hum} | Positive control, previously shown rescue of glycogen storage phenotype |
| Gaa^{-/-} insertion 12847scfv:hGAA | Gaa^{-/-}/ Tfrc^{hum} | Experimental insertion group |
| Gaa^{-/-} untreated | Gaa^{-/-}/ Cd63^{hum} | Untreated Pompe disease mouse (CD63 humanized) |
| Gaa^{-/-} insertion anti-CD63scfv:hGAA | Gaa^{-/-}/ Cd63^{hum} | Negative control for BBB-crossing (muscle targeted) |

[1000] Western blot (Table 39, FIG. 24A). Tissue lysates were prepared by lysis in RIPA buffer with protease inhibitors (1861282, Thermo Fisher, Waltham, MA, USA). Tissue lysates were homogenized with a bead homogenizer (FastPrep5, MP Biomedicals, Santa Ana, CA, USA). Cells or tissue lysates were run on SDS-PAGE gels using the Novex system (LifeTech Thermo, XPO4200BOX, LC2675, LC3675, LC2676). Gels were transferred to low-fluorescence polyvinylidene fluoridev (PVDF) membrane (IPFL07810, LI-COR, Lincoln, NE, USA) and stained with Revert 700 Total Protein Stain (TPS; 926-11010 LI-COR, Lincoln, NE, USA), followed by blocking with Odyssey blocking buffer (927-500000, LI-COR, Lincoln, NE, USA) in Tris buffer saline with 0.1% Tween 20 and staining with antibodies against GAA (ab137068, Abcam, Cambridge, MA, USA), or anti-GAPDH (ab9484, Abcam, Cambridge, MA, USA) and the appropriate secondary (926-32213 or 925-68070, LI-COR, Lincoln, NE, USA). Blots were imaged with a LI-COR Odyssey CLx.

[1001] Protein band intensity was quantified in LI-COR Image Studio software. The quantification of the mature 77 kDa GAA band for each sample was determined by normalizing to the lane’s TPS signal (loading control).

[1002] Glycogen quantification (Table 40, FIG. 24B). Tissues were dissected from mice immediately after sacrifice by CO₂ asphyxiation, snap frozen in liquid nitrogen, and stored at -80° C. Tissues were lysed on a benchtop homogenizer with stainless steel beads in distilled water for glycogen measurements or RIPA buffer for protein analyses. Glycogen analysis lysates were boiled and centrifuged to clear debris. Glycogen measurements were performed fluorometrically with a commercial kit according to manufacturer’s instructions (K646, BioVision, Milpitas, CA, USA).

TABLE 39

Quantification of hGAA protein in tissues of Gaa^{-/-}/Tfrc^{hum} mice treated with insertion anti-hTfR 12847scfv:hGAA

| Treatment group | Liver total hGAA | Serum total hGAA | Cerebrum mature hGAA | Quadricep mature hGAA |
|---|---|---|---|---|
| Gaa^{-/-} insertion AAV only negative control | 0.02±0.003 | 0.03±0.02 | 0.002±0.001 | 0.006±0.002 |
| Gaa^{-/-} episomal AAV8 TTR 12847scfv:hGAA | 2.35±0.72 | 3.65±2.09 | 0.49±0.20^{§§} | 0.148±0.043^{§§} |
| Gaa^{-/-} insertion 12847scfv:hGAA | 4.31±0.87^{∗} | 3.47±2.37 | 0.57±0.26^{§§} | 0.141±0.062^{§§} |
| Gaa^{-/-} insertion anti-CD63scfv:hGAA | 2.67±1.04^{∗} | 0.93±0.55^{∗} | 0.01±0.003 | 0.060±0.037 |

[1003] All values are arbitrary units, mean ± SD, n=3-8 per group. One Way ANOVA ^{∗}p<0.05 vs. Gaa^{-/-} episomal AAV8 TTR 12847scfv:GAA group; ^{§§}p<0.001 vs. AAV only negative control group.

TABLE 40

Quantification of glycogen in tissues of Gaa^{-/-}/Tfrc^{hum} mice treated with insertion anti-hTfR 12847scfv:hGAA

| Treatment group | Cerebrum | Quadricep |
|---|---|---|
| Wt untreated | 0.10±0.07 | 0.37±0.13 |
| Gaa^{-/-}/Tfrc^{hum} untreated (Tfrc^{hum}) | 2.76±0.41 | 12.75±1.88 |
| Gaa^{-/-}/Tfrc^{hum} insertion AAV only | 2.17±0.40^{∗} | 10.64±2.56 |
| Gaa^{-/-}/Tfrc^{hum} episomal AAV8 TTR 12847scfv:hGAA | 0.13+-0.03^{∗∗∗§} | 2.44±2.21^{∗∗∗§} |
| Gaa^{-/-}/Tfr^{hum} insertion 12847scfv:hGAA | 0.16±0.05^{∗∗∗§} | 1.67±0.76^{∗∗∗§} |
| Gaa^{-/-}/Cd63^{hum} untreated | 2.34±0.30 | 11.91±1.01 |
| Gaa^{-/-}/Cd63^{hum} insertion anti-CD63scfv:hGAA | 1.71±0.20^{∗} | 4.06±0.13^{∗∗} |

[1004] All values are glycogen µg/mg tissue, mean ± SD, n=3-8 per group. One Way ANOVA ^{∗}p<0.01 vs. Gaa^{-/-}/Cd63^{hum} untreated group; ^{∗∗}p<0.001 vs. Gaa^{-/-}/Cd63^{hum} untreated group; ^{∗∗∗}p<0.0001 vs. Gaa^{-/-}/Tfrc^{hum} untreated group; non-significant vs. Wt untreated group.

[1005] Similar experiments are then performed in which neonatal Gaa^{-/-};Tfrc^{hu/hu} mice are dosed intravenously at P1 with the following: (1) recombinant AAV8 encoding anti-TfR:GAA; or (2) LNP-g666 and recombinant AAV8 anti-TfR:GAA insertion template. Untreated Gaa^{-/-} ;Tfrc^{hu/hu} mice and wild type mice are used as controls. Blood is collected and serum prepared at various time points post-administrations, and tissues are collected at various time points post-administration. Serum anti-TfR:GAA levels and glycogen levels in various muscle and CNS tissues are measured over the time course.

[1006] To assess whether glycogen reduction translates into improved muscle function, the mice are tested on grip strength apparatuses at a time point post-administration. Limb grip strength is measured with a force meter (Columbus Instruments, Columbus, OH, USA). All tests are performed in triplicate.

[1007] In summary, the combination of the highly precise and targeted CRISPR/Cas9 technology delivered by LNP and the anti-TfR:GAA DNA template delivered by the selected rAAV8 vector allows for long-term expression of anti-TfR:GAA protein from hepatocytes and delivery to muscle cells and CNS cells affected in PD, potentially providing a life-long effective treatment to PD patients, including neonatal patients.

### Example 7. Optimized Anti-TfR:GAA DNA Templates

[1008] Optimized anti-TfR:GAA templates were designed and generated to develop a lead for non-human primate (NHP) studies. To select a development candidate, several versions of the four candidate anti-TfR:GAA insertion templates were generated in which the nucleotide sequence encoding the anti-TfR:GAA is modified (e.g., by depleting CpGs). Tables 41 and 42 list the different versions of anti-TfR:GAA inserts designed. Each of the anti-TfR:GAA inserts in Table 42 use the optimized GAA sequence set forth in SEQ ID NO: 176.

TABLE 41

Anti-TfR:GAA Inserts for Insertion Cassettes

| Anti-TfR:GAA Insert | CpGs | SEQ ID NO (optimized GAA) |
|---|---|---|
| 12799 - DC | 0 | 205 |
| 12799 - GS | 0 | 206 |
| 12799 - 1^{st} generation | 160 | 174 |
| 12839 - DC | 0 | 207 |
| 12839 - GS | 0 | 208 |
| 12839 - 1^{st} generation | 163 | 174 |
| 12843 - DC | 0 | 209 |
| 12843 - GS | 0 | 210 |
| 12843 - 1^{st} generation | 160 | 174 |
| 12847 - DC | 0 | 211 |
| 12847 - GS | 0 | 212 |
| 12847 - 1^{st} generation | 160 | 174 |

TABLE 42

Anti-TfR:GAA Inserts for Insertion Cassettes

| Anti-TfR:GAA Insert | CpGs in Transgene | SEQ ID NO |
|---|---|---|
| 12799 1^{st} generation | 160 | 574 |
| 12799 GA 0 | 0 | 578 |
| 12799 GS 0 | 0 | 579 |
| 12799 GS 0v2 | 0 | 580 |
| 12843 1^{st} generation | 160 | 576 |
| 12843 GA 0 | 0 | 581 |
| 12843 GS 0 | 0 | 582 |
| 12843 GS 0v2 | 0 | 583 |
| 12847 1^{st} generation | 160 | 577 |
| 12847 GA 0 | 0 | 584 |
| 12847 GS 0 | 0 | 585 |
| 12847 GS 0v2 | 0 | 586 |

[1009] Peripheral blood mononuclear cells (PBMCs) are isolated from human blood. Plasmacytoid dendritic cells (pDCs) are enriched and combined with pBMCs (1e4 pDCs + 1e5 PBMCs per well). The cells are incubated for 16-18 hours with AAV or control CpG-oligodeoxynucleotides (ODNs). The supernatants are harvested, and an IFNα ELISA is performed. This assay assesses whether CpG-depleted anti-TfR:GAA sequences exhibit reduced IFN-I responses in a primary human plasmacytoid DC-based assay as compared to non-CpG-depleted sequences.

[1010] Activity of the various 12847 optimized anti-TfR:GAA templates (SEQ ID NOS: 732-735 or 584-586 (coding sequences)) and 12843 optimized anti-TfR:GAA templates (SEQ ID NOS: 729-731 or 581-583 (coding sequences)) was tested in a primary human hepatocyte assay. AAV templates were packaged into AAV2 viruses. Primary human hepatocytes were grown in 96-well plates and administered the AAV containing the template DNA and LNP-g9860 at fixed MOI (6e4) with LNP dose titration. Supernatants were collected 7 days post-dosing and stored at -80° C. Supernatants were thawed and GAA activity in the supernatants was measured using a 4-methylumbelliferone-based fluorometric assay (K690, BioVision, Milpitas, CA, USA) as a measurement of amount of enzymatically active GAA produced and secreted from the cells. As shown in FIGS. 25A-25B, all CpG-depleted anti-TfR:GAA templates exhibited increased GAA activity in primary human hepatocyte supernatant compared to the native anti-TfR:GAA templates.

[1011] Activity of the optimized templates is tested in a primary human hepatocyte assay. AAV templates are packaged into AAV2 viruses. Primary human hepatocytes are grown in 96-well plates and administered the AAV containing the template DNA and LNP-g9860 at fixed LNP concentration with AAV dose titration. Supernatants are collected 7 days post-dosing and stored at -80° C. Supernatants are thawed and GAA activity in the supernatants is measured using a 4-methylumbelliferone-based fluorometric assay (K690, BioVision, Milpitas, CA, USA) as a measurement of amount of enzymatically active GAA produced and secreted from the cells.

[1012] Activity of the 12847 scFv:GAA 0 CpG v0 optimized template (SEQ ID NO: 733 or 584 (coding sequence)) was then validated in the PD mouse model, Gaa^{-/-};Tfrc^{hu/hu}, as described in Example 6. Three-month old mice (Gaa^{-/-};Tfrc^{hu/hu} mice and Gaa^{-/-};CD63^{hu/hu} mice) were dosed intravenously with 3 mg/kg LNP-g9860 and 3ev12 vg/kg AAV8 anti-TfR:GAA templates (native or 12847 0 CpG v0) and optimized anti-CD63:GAA template (GA 0 CpG anti-CD63:GAA template; SEQ ID NO: 736 or 196 (coding sequence)), respectively. Western blots for GAA (scFv:GAA and mature GAA) were done as in Example 6 and confirmed delivery of GAA to the brain (cerebrum) following albumin insertion of the native anti-TfR:GAA template or the 0 CpG anti-TfR:GAA template (FIG. 26A). Glycogen quantification in cerebrum, quadriceps, diaphragm, and heart was also done as in Example 6 and confirmed that albumin insertion of the 0 CpG anti-TfR:GAA templates retained TfR binding and GAA activity in vivo and that the CpG depleted sequence was as effective as the native sequence at rescuing the glycogen storage phenotype in Gaa^{-/-};Tfrc^{hu/hu} mice (FIG. 26B and Table 43).

TABLE 43

Quantification of glycogen in tissues of Gaa^{-/-}/Tfrc^{hum} mice treated with anti-hTfRscfv:hGAA insertion templates

| Treatment group | Cerebrum | Diaphragm | Heart | Quadricep |
|---|---|---|---|---|
| hTFRC Wt | 0.256±0.175^{∗} | 2.44±1.97^{∗} | 0.042±0.022^{∗} | 0.724±0.611^{∗} |
| hTFRC Gaa-/- Untreated | 2.56±0.237 | 17.54±1.72 | 34.56±6.36 | 7.96±1.38 |
| hTFRC Gaa^{-/-} 12847:GAA native | 0.076±0.022^{∗} | 1.30±0.973^{∗} | 0.405±0.351^{∗} | 1.48±0.867^{∗} |
| hTFRC Gaa^{-/-} 12847:GAA 0CpG | 0.114±0.049^{∗} | 1.55±1.60^{∗} | 0.35±0.372^{∗} | 1.21:0.821^{∗} |
| hCD63 Gaa^{-/-} Untreated | 2.39±0.432 | 18.30±2.62 | 30.88±2.451 | 7.37±1.134 |
| hCD63 Gaa^{-/-} CD63:GAA 0CpG | 1.68±0.220^{∗} | 0.544±0.294^{∗} | 0.0634±0.045^{∗} | 0.803±0.297^{∗} |

All values are glycogen µg/mg tissue, mean ± SD, n=5-8 per group. One Way ANOVA ^{∗}p<0.0001 vs. hTFRC Gaa^{-/-} Untreated group.

[1013] Expression of the optimized templates (12847 scFv:GAA 0 CpG v0 (SEQ ID NO: 733 or 584 (coding sequence)), and 12843 scFv:GAA 0 CpG v0 (SEQ ID NO: 729 or 581 (coding sequence))) is evaluated in non-human primates. Expression is evaluated by administering LNP-g9860 as described in Example 1 and rAAV8 comprising each optimized template. Expression is analyzed over a multi-week study. Tissues are also collected for analysis of biodistribution of GAA, and GAA activity is assessed in collected tissues.

TABLE 44

Study to evaluate expression of CpG-depleted anti-TfR:GAA insertion templates in non-human primates

| Group | Name | AAV8 Vector | AAV8 Dose | LNP Dose | Guide | n |
|---|---|---|---|---|---|---|
| 1 | Vehicle control | Vehicle only | Vehicle only | Vehicle only | N/A | 1 |
| 2 | Anti-CD63:GAA AAV only control | Anti-CD63:GAA | 1.5e13 vg/kg | Vehicle only | N/A | 1 |
| 3 | Anti-CD63:GAA | Anti-CD63:GAA | 1.5e13 vg/kg | 3 mg/kg LNP | G9860 | 4 |
| 4 | Anti-CD63:GAA alt gRNA | Anti-CD63:GAA | 1.5e13 vg/kg | 3 mg/kg LNP | G9844 | 4 |
| 5 | 12847 Anti-TfR:GAA AAV only control | Anti-TfR:GAA #1 | 1.5e13 vg/kg | Vehicle only | N/A | 1 |
| 6 | 12847 Anti-TfR:GAA | Anti-TfR:GAA #1 | 1.5e13 vg/kg | 3 mg/kg LNP | G9860 | 4 |
| 7 | 12847 Anti-TfR:GAA alt gRNA | Anti-TfR:GAA #1 | 1.5e13 vg/kg | 3 mg/kg LNP | G9844 | 4 |
| 8 | 12843 Anti-TfR:GAA AAV only control | Anti-TfR:GAA #2 | 1.5e13 vg/kg | Vehicle only | N/A | 1 |
| 9 | 12843 Anti-TfR:GAA | Anti-TfR:GAA #2 | 1.5e13 vg/kg | 3 mg/kg LNP | G9860 | 4 |
| 10 | 12843 Anti-TfR:GAA alt gRNA | Anti-TfR:GAA #2 | 1.5e13 vg/kg | 3 mg/kg LNP | G9844 | 4 |
| | | | | | Total animals: | 28 |

TABLE 45

Additional GAA sequences

| | |
|---|---|
| Sequence name | Amino acids |
| GAA_1 77 (SEQ ID NO: 213) | GHILLHDFLLVPRELSGSSPVLEETHPAHQQGASRPGPRDAQAHPGRPRAVPTQCDVPP NSRFDCAPDKAITQEQCEARGCCYIPAKQGLQGAQMGQPWCFFPPSYPSYKLENLSSSE MGYTATLTRTTPTFFPKDILTLRLDVMMETENRLHFTIKDPANRRYEVPLETPHVHSRA PSPLYSVEFSEEPFGVIVRRQLDGRVLLNTTVAPLFFADQFLQLSTSLPSQYITGLAEHLS PLMLSTSWTRITLWNRDLAPTPGANLYGSHPFYLALEDGGSAHGVFLLNSNAMDVVL QPSPALSWRSTGGILDVYIFLGPEPKSVVQQYLDVVGYPFMPPYWGLGFHLCRWGYSS TAITRQVVENMTRAHFPLDVQWNDLDYMDSRRDFTFNKDGFRDFPAMVQELHQGGR RYMMIVDPAISSSGPAGSYRPYDEGLRRGVFITNETGQPLIGKVWPGSTAFPDFTNPTA LAWWEDMVAEFHDQVPFDGMWIDMNEPSNFIRGSEDGCPNNELENPPYVPGVVGGT LQAATICASSHQFLSTHYNLHNLYGLTEAIASHRALVKARGTRPFVISRSTFAGHGRYA GHWTGDVWSSWEQLASSVPEILQFNLLGVPLVGADVCGFLGNTSEELCVRWTQLGAF YPFMRNHNSLLSLPQEPYSFSEPAQQAMRKALTLRYALLPHLYTLFHQAHVAGETVAR PLFLEFPKDSSTWTVDHQLLWGEALLITPVLQAGKAEVTGYFPLGTWYDLQTVPVEAL GSLPPPPAAPREPAIHSEGQWVTLPAPLDTINVHLRAGYIIPLQGPGLTTTESRQQPMAL AVALTKGGEARGELFWDDGESLEVLERGAYTQVIFLARNNTIVNELVRVTSEGAGLQL QKVTVLGVATAPQQVLSNGVPVSNFTYSPDTKVLDICVSLLMGEQFLVSWC |
| GAA_2 22 (SEQ ID NO: 214) | LLVPRELSGSSPVLEETHPAHQQGASRPGPRDAQAHPGRPRAVPTQCDVPPNSRFDCAP DKAITQEQCEARGCCYIPAKQGLQGAQMGQPWCFFPPSYPSYKLENLSSSEMGYTATL TRTTPTFFPKDILTLRLDVMMETENRLHFTIKDPANRRYEVPLETPHVHSRAPSPLYSVE FSEEPFGVIVRRQLDGRVLLNTTVAPLFFADQFLQLSTSLPSQYITGLAEHLSPLMLSTS WTRITLWNRDLAPTPGANLYGSHPFYLALEDGGSAHGVFLLNSNAMDVVLQPSPALS WRSTGGILDVYIFLGPEPKSVVQQYLDVVGYPFMPPYWGLGFHLCRWGYSSTAITRQV VENMTRAHFPLDVQWNDLDYMDSRRDFTFNKDGFRDFPAMVQELHQGGRRYMMIV DPAISSSGPAGSYRPYDEGLRRGVFITNETGQPLIGKVWPGSTAFPDFTNPTALAWWED MVAEFHDQVPFDGMWIDMNEPSNFIRGSEDGCPNNELENPPYVPGVVGGTLQAATICA SSHQFLSTHYNLHNLYGLTEAIASHRALVKARGTRPFVISRSTFAGHGRYAGHWTGDV WSSWEQLASSVPEILQFNLLGVPLVGADVCGFLGNTSEELCVRWTQLGAFYPFMRNH NSLLSLPQEPYSFSEPAQQAMRKALTLRYALLPHLYTLFHQAHVAGETVARPLFLEFPK DSSTWTVDHQLLWGEALLITPVLQAGKAEVTGYFPLGTWYDLQTVPVEALGSLPPPPA APREPAIHSEGQWVTLPAPLDTINVHLRAGYIIPLQGPGLTTTESRQQPMALAVALTKG GEARGELFWDDGESLEVLERGAYTQVIFLARNNTIVNELVRVTSEGAGLQLQKVTVLG VATAPQQVLSNGVPVSNFTYSPDTKVLDICVSLLMGEQFLVSWC |
| GAA_3 61 (SEQ ID NO: 215) | AHPGRPRAVPTQCDVPPNSRFDCAPDKAITQEQCEARGCCYIPAKQGLQGAQMGQPW CFFPPSYPSYKLENLSSSEMGYTATLTRTTPTFFPKDILTLRLDVMMETENRLHFTIKDP ANRRYEVPLETPHVHSRAPSPLYSVEFSEEPFGVIVRRQLDGRVLLNTTVAPLFFADQFL QLSTSLPSQYITGLAEHLSPLMLSTSWTRITLWNRDLAPTPGANLYGSHPFYLALEDGG SAHGVFLLNSNAMDVVLQPSPALSWRSTGGILDVYIFLGPEPKSVVQQYLDVVGYPFM PPYWGLGFHLCRWGYSSTAITRQVVENMTRAHFPLDVQWNDLDYMDSRRDFTFNKD GFRDFPAMVQELHQGGRRYMMIVDPAISSSGPAGSYRPYDEGLRRGVFITNETGQPLIG KVWPGSTAFPDFTNPTALAWWEDMVAEFHDQVPFDGMWIDMNEPSNFIRGSEDGCPN NELENPPYVPGVVGGTLQAATICASSHQFLSTHYNLHNLYGLTEAIASHRALVKARGT RPFVISRSTFAGHGRYAGHWTGDVWSSWEQLASSVPEILQFNLLGVPLVGADVCGFLG NTSEELCVRWTQLGAFYPFMRNHNSLLSLPQEPYSFSEPAQQAMRKALTLRYALLPHL YTLFHQAHVAGETVARPLFLEFPKDSSTWTVDHQLLWGEALLITPVLQAGKAEVTGYF PLGTWYDLQTVPVEALGSLPPPPAAPREPAIHSEGQWVTLPAPLDTINVHLRAGYIIPLQ GPGLTTTESRQQPMALAVALTKGGEARGELFWDDGESLEVLERGAYTQVIFLARNNTI VNELVRVTSEGAGLQLQKVTVLGVATAPQQVLSNGVPVSNFTYSPDTKVLDICVSLLM GEQFLVSWC |

The application's sequence listing, which the Patent Office published only in electronic form, follows.

SEQUENCE LISTING (736 sequences)

SEQ ID NO: 1 - RNA, 4423 nt, synthetic construct
  misc_feature 1..4423: note = Synthetic
  source 1..4423: mol_type = other RNA
gggaagctcagaataaacgctcaactttggccggatctgccaccatggacaagaagtactccatcggcctggacatcggcaccaactccgtgggctgggccgtgatcaccgacgagtacaaggtgccctccaagaagttcaaggtgctgggcaacaccgaccggcactccatcaagaagaacctgatcggcgccctgctgttcgactccggcgagaccgccgaggccacccggctgaagcggaccgcccggcggcggtacacccggcggaagaaccggatctgctacctgcaggagatcttctccaacgagatggccaaggtggacgactccttcttccaccggctggaggagtccttcctggtggaggaggacaagaagcacgagcggcaccccatcttcggcaacatcgtggacgaggtggcctaccacgagaagtaccccaccatctaccacctgcggaagaagctggtggactccaccgacaaggccgacctgcggctgatctacctggccctggcccacatgatcaagttccggggccacttcctgatcgagggcgacctgaaccccgacaactccgacgtggacaagctgttcatccagctggtgcagacctacaaccagctgttcgaggagaaccccatcaacgcctccggcgtggacgccaaggccatcctgtccgcccggctgtccaagtcccggcggctggagaacctgatcgcccagctgcccggcgagaagaagaacggcctgttcggcaacctgatcgccctgtccctgggcctgacccccaacttcaagtccaacttcgacctggccgaggacgccaagctgcagctgtccaaggacacctacgacgacgacctggacaacctgctggcccagatcggcgaccagtacgccgacctgttcctggccgccaagaacctgtccgacgccatcctgctgtccgacatcctgcgggtgaacaccgagatcaccaaggcccccctgtccgcctccatgatcaagcggtacgacgagcaccaccaggacctgaccctgctgaaggccctggtgcggcagcagctgcccgagaagtacaaggagatcttcttcgaccagtccaagaacggctacgccggctacatcgacggcggcgcctcccaggaggagttctacaagttcatcaagcccatcctggagaagatggacggcaccgaggagctgctggtgaagctgaaccgggaggacctgctgcggaagcagcggaccttcgacaacggctccatcccccaccagatccacctgggcgagctgcacgccatcctgcggcggcaggaggacttctaccccttcctgaaggacaaccgggagaagatcgagaagatcctgaccttccggatcccctactacgtgggccccctggcccggggcaactcccggttcgcctggatgacccggaagtccgaggagaccatcaccccctggaacttcgaggaggtggtggacaagggcgcctccgcccagtccttcatcgagcggatgaccaacttcgacaagaacctgcccaacgagaaggtgctgcccaagcactccctgctgtacgagtacttcaccgtgtacaacgagctgaccaaggtgaagtacgtgaccgagggcatgcggaagcccgccttcctgtccggcgagcagaagaaggccatcgtggacctgctgttcaagaccaaccggaaggtgaccgtgaagcagctgaaggaggactacttcaagaagatcgagtgcttcgactccgtggagatctccggcgtggaggaccggttcaacgcctccctgggcacctaccacgacctgctgaagatcatcaaggacaaggacttcctggacaacgaggagaacgaggacatcctggaggacatcgtgctgaccctgaccctgttcgaggaccgggagatgatcgaggagcggctgaagacctacgcccacctgttcgacgacaaggtgatgaagcagctgaagcggcggcggtacaccggctggggccggctgtcccggaagctgatcaacggcatccgggacaagcagtccggcaagaccatcctggacttcctgaagtccgacggcttcgccaaccggaacttcatgcagctgatccacgacgactccctgaccttcaaggaggacatccagaaggcccaggtgtccggccagggcgactccctgcacgagcacatcgccaacctggccggctcccccgccatcaagaagggcatcctgcagaccgtgaaggtggtggacgagctggtgaaggtgatgggccggcacaagcccgagaacatcgtgatcgagatggcccgggagaaccagaccacccagaagggccagaagaactcccgggagcggatgaagcggatcgaggagggcatcaaggagctgggctcccagatcctgaaggagcaccccgtggagaacacccagctgcagaacgagaagctgtacctgtactacctgcagaacggccgggacatgtacgtggaccaggagctggacatcaaccggctgtccgactacgacgtggaccacatcgtgccccagtccttcctgaaggacgactccatcgacaacaaggtgctgacccggtccgacaagaaccggggcaagtccgacaacgtgccctccgaggaggtggtgaagaagatgaagaactactggcggcagctgctgaacgccaagctgatcacccagcggaagttcgacaacctgaccaaggccgagcggggcggcctgtccgagctggacaaggccggcttcatcaagcggcagctggtggagacccggcagatcaccaagcacgtggcccagatcctggactcccggatgaacaccaagtacgacgagaacgacaagctgatccgggaggtgaaggtgatcaccctgaagtccaagctggtgtccgacttccggaaggacttccagttctacaaggtgcgggagatcaacaactaccaccacgcccacgacgcctacctgaacgccgtggtgggcaccgccctgatcaagaagtaccccaagctggagtccgagttcgtgtacggcgactacaaggtgtacgacgtgcggaagatgatcgccaagtccgagcaggagatcggcaaggccaccgccaagtacttcttctactccaacatcatgaacttcttcaagaccgagatcaccctggccaacggcgagatccggaagcggcccctgatcgagaccaacggcgagaccggcgagatcgtgtgggacaagggccgggacttcgccaccgtgcggaaggtgctgtccatgccccaggtgaacatcgtgaagaagaccgaggtgcagaccggcggcttctccaaggagtccatcctgcccaagcggaactccgacaagctgatcgcccggaagaaggactgggaccccaagaagtacggcggcttcgactcccccaccgtggcctactccgtgctggtggtggccaaggtggagaagggcaagtccaagaagctgaagtccgtgaaggagctgctgggcatcaccatcatggagcggtcctccttcgagaagaaccccatcgacttcctggaggccaagggctacaaggaggtgaagaaggacctgatcatcaagctgcccaagtactccctgttcgagctggagaacggccggaagcggatgctggcctccgccggcgagctgcagaagggcaacgagctggccctgccctccaagtacgtgaacttcctgtacctggcctcccactacgagaagctgaagggctcccccgaggacaacgagcagaagcagctgttcgtggagcagcacaagcactacctggacgagatcatcgagcagatctccgagttctccaagcgggtgatcctggccgacgccaacctggacaaggtgctgtccgcctacaacaagcaccgggacaagcccatccgggagcaggccgagaacatcatccacctgttcaccctgaccaacctgggcgcccccgccgccttcaagtacttcgacaccaccatcgaccggaagcggtacacctccaccaaggaggtgctggacgccaccctgatccaccagtccatcaccggcctgtacgagacccggatcgacctgtcccagctgggcggcgacggcggcggctcccccaagaagaagcggaaggtgtgactagcaccagcctcaagaacacccgaatggagtctctaagctacataataccaacttacactttacaaaatgttgtcccccaaaatgtagccattcgtatctgctcctaataaaaagaaagtttcttcacattctctcgagaaaaaaaaaaaaaaaaaaaaaaaaaaaaaaaaaaaaaaaaaaaaaaaaaaaaaaaaaaaaaaaaaaaaaaaaaaaaaaaaaaaaaaaaaaaaatctag

SEQ ID NO: 2 - RNA, 4140 nt, synthetic construct
  misc_feature 1..4140: note = Synthetic
  source 1..4140: mol_type = other RNA
atggacaagaagtactccatcggcctggacatcggcaccaactccgtgggctgggccgtgatcaccgacgagtacaaggtgccctccaagaagttcaaggtgctgggcaacaccgaccggcactccatcaagaagaacctgatcggcgccctgctgttcgactccggcgagaccgccgaggccacccggctgaagcggaccgcccggcggcggtacacccggcggaagaaccggatctgctacctgcaggagatcttctccaacgagatggccaaggtggacgactccttcttccaccggctggaggagtccttcctggtggaggaggacaagaagcacgagcggcaccccatcttcggcaacatcgtggacgaggtggcctaccacgagaagtaccccaccatctaccacctgcggaagaagctggtggactccaccgacaaggccgacctgcggctgatctacctggccctggcccacatgatcaagttccggggccacttcctgatcgagggcgacctgaaccccgacaactccgacgtggacaagctgttcatccagctggtgcagacctacaaccagctgttcgaggagaaccccatcaacgcctccggcgtggacgccaaggccatcctgtccgcccggctgtccaagtcccggcggctggagaacctgatcgcccagctgcccggcgagaagaagaacggcctgttcggcaacctgatcgccctgtccctgggcctgacccccaacttcaagtccaacttcgacctggccgaggacgccaagctgcagctgtccaaggacacctacgacgacgacctggacaacctgctggcccagatcggcgaccagtacgccgacctgttcctggccgccaagaacctgtccgacgccatcctgctgtccgacatcctgcgggtgaacaccgagatcaccaaggcccccctgtccgcctccatgatcaagcggtacgacgagcaccaccaggacctgaccctgctgaaggccctggtgcggcagcagctgcccgagaagtacaaggagatcttcttcgaccagtccaagaacggctacgccggctacatcgacggcggcgcctcccaggaggagttctacaagttcatcaagcccatcctggagaagatggacggcaccgaggagctgctggtgaagctgaaccgggaggacctgctgcggaagcagcggaccttcgacaacggctccatcccccaccagatccacctgggcgagctgcacgccatcctgcggcggcaggaggacttctaccccttcctgaaggacaaccgggagaagatcgagaagatcctgaccttccggatcccctactacgtgggccccctggcccggggcaactcccggttcgcctggatgacccggaagtccgaggagaccatcaccccctggaacttcgaggaggtggtggacaagggcgcctccgcccagtccttcatcgagcggatgaccaacttcgacaagaacctgcccaacgagaaggtgctgcccaagcactccctgctgtacgagtacttcaccgtgtacaacgagctgaccaaggtgaagtacgtgaccgagggcatgcggaagcccgccttcctgtccggcgagcagaagaaggccatcgtggacctgctgttcaagaccaaccggaaggtgaccgtgaagcagctgaaggaggactacttcaagaagatcgagtgcttcgactccgtggagatctccggcgtggaggaccggttcaacgcctccctgggcacctaccacgacctgctgaagatcatcaaggacaaggacttcctggacaacgaggagaacgaggacatcctggaggacatcgtgctgaccctgaccctgttcgaggaccgggagatgatcgaggagcggctgaagacctacgcccacctgttcgacgacaaggtgatgaagcagctgaagcggcggcggtacaccggctggggccggctgtcccggaagctgatcaacggcatccgggacaagcagtccggcaagaccatcctggacttcctgaagtccgacggcttcgccaaccggaacttcatgcagctgatccacgacgactccctgaccttcaaggaggacatccagaaggcccaggtgtccggccagggcgactccctgcacgagcacatcgccaacctggccggctcccccgccatcaagaagggcatcctgcagaccgtgaaggtggtggacgagctggtgaaggtgatgggccggcacaagcccgagaacatcgtgatcgagatggcccgggagaaccagaccacccagaagggccagaagaactcccgggagcggatgaagcggatcgaggagggcatcaaggagctgggctcccagatcctgaaggagcaccccgtggagaacacccagctgcagaacgagaagctgtacctgtactacctgcagaacggccgggacatgtacgtggaccaggagctggacatcaaccggctgtccgactacgacgtggaccacatcgtgccccagtccttcctgaaggacgactccatcgacaacaaggtgctgacccggtccgacaagaaccggggcaagtccgacaacgtgccctccgaggaggtggtgaagaagatgaagaactactggcggcagctgctgaacgccaagctgatcacccagcggaagttcgacaacctgaccaaggccgagcggggcggcctgtccgagctggacaaggccggcttcatcaagcggcagctggtggagacccggcagatcaccaagcacgtggcccagatcctggactcccggatgaacaccaagtacgacgagaacgacaagctgatccgggaggtgaaggtgatcaccctgaagtccaagctggtgtccgacttccggaaggacttccagttctacaaggtgcgggagatcaacaactaccaccacgcccacgacgcctacctgaacgccgtggtgggcaccgccctgatcaagaagtaccccaagctggagtccgagttcgtgtacggcgactacaaggtgtacgacgtgcggaagatgatcgccaagtccgagcaggagatcggcaaggccaccgccaagtacttcttctactccaacatcatgaacttcttcaagaccgagatcaccctggccaacggcgagatccggaagcggcccctgatcgagaccaacggcgagaccggcgagatcgtgtgggacaagggccgggacttcgccaccgtgcggaaggtgctgtccatgccccaggtgaacatcgtgaagaagaccgaggtgcagaccggcggcttctccaaggagtccatcctgcccaagcggaactccgacaagctgatcgcccggaagaaggactgggaccccaagaagtacggcggcttcgactcccccaccgtggcctactccgtgctggtggtggccaaggtggagaagggcaagtccaagaagctgaagtccgtgaaggagctgctgggcatcaccatcatggagcggtcctccttcgagaagaaccccatcgacttcctggaggccaagggctacaaggaggtgaagaaggacctgatcatcaagctgcccaagtactccctgttcgagctggagaacggccggaagcggatgctggcctccgccggcgagctgcagaagggcaacgagctggccctgccctccaagtacgtgaacttcctgtacctggcctcccactacgagaagctgaagggctcccccgaggacaacgagcagaagcagctgttcgtggagcagcacaagcactacctggacgagatcatcgagcagatctccgagttctccaagcgggtgatcctggccgacgccaacctggacaaggtgctgtccgcctacaacaagcaccgggacaagcccatccgggagcaggccgagaacatcatccacctgttcaccctgaccaacctgggcgcccccgccgccttcaagtacttcgacaccaccatcgaccggaagcggtacacctccaccaaggaggtgctggacgccaccctgatccaccagtccatcaccggcctgtacgagacccggatcgacctgtcccagctgggcggcgacggcggcggctcccccaagaagaagcggaaggtgtga

SEQ ID NO: 3 - DNA, 4140 bp, synthetic construct
  misc_feature 1..4140: note = Synthetic
  source 1..4140: mol_type = other DNA
atggacaagaagtactccatcggcctggacatcggcaccaactccgtgggctgggccgtgatcaccgacgagtacaaggtgccctccaagaagttcaaggtgctgggcaacaccgaccggcactccatcaagaagaacctgatcggcgccctgctgttcgactccggcgagaccgccgaggccacccggctgaagcggaccgcccggcggcggtacacccggcggaagaaccggatctgctacctgcaggagatcttctccaacgagatggccaaggtggacgactccttcttccaccggctggaggagtccttcctggtggaggaggacaagaagcacgagcggcaccccatcttcggcaacatcgtggacgaggtggcctaccacgagaagtaccccaccatctaccacctgcggaagaagctggtggactccaccgacaaggccgacctgcggctgatctacctggccctggcccacatgatcaagttccggggccacttcctgatcgagggcgacctgaaccccgacaactccgacgtggacaagctgttcatccagctggtgcagacctacaaccagctgttcgaggagaaccccatcaacgcctccggcgtggacgccaaggccatcctgtccgcccggctgtccaagtcccggcggctggagaacctgatcgcccagctgcccggcgagaagaagaacggcctgttcggcaacctgatcgccctgtccctgggcctgacccccaacttcaagtccaacttcgacctggccgaggacgccaagctgcagctgtccaaggacacctacgacgacgacctggacaacctgctggcccagatcggcgaccagtacgccgacctgttcctggccgccaagaacctgtccgacgccatcctgctgtccgacatcctgcgggtgaacaccgagatcaccaaggcccccctgtccgcctccatgatcaagcggtacgacgagcaccaccaggacctgaccctgctgaaggccctggtgcggcagcagctgcccgagaagtacaaggagatcttcttcgaccagtccaagaacggctacgccggctacatcgacggcggcgcctcccaggaggagttctacaagttcatcaagcccatcctggagaagatggacggcaccgaggagctgctggtgaagctgaaccgggaggacctgctgcggaagcagcggaccttcgacaacggctccatcccccaccagatccacctgggcgagctgcacgccatcctgcggcggcaggaggacttctaccccttcctgaaggacaaccgggagaagatcgagaagatcctgaccttccggatcccctactacgtgggccccctggcccggggcaactcccggttcgcctggatgacccggaagtccgaggagaccatcaccccctggaacttcgaggaggtggtggacaagggcgcctccgcccagtccttcatcgagcggatgaccaacttcgacaagaacctgcccaacgagaaggtgctgcccaagcactccctgctgtacgagtacttcaccgtgtacaacgagctgaccaaggtgaagtacgtgaccgagggcatgcggaagcccgccttcctgtccggcgagcagaagaaggccatcgtggacctgctgttcaagaccaaccggaaggtgaccgtgaagcagctgaaggaggactacttcaagaagatcgagtgcttcgactccgtggagatctccggcgtggaggaccggttcaacgcctccctgggcacctaccacgacctgctgaagatcatcaaggacaaggacttcctggacaacgaggagaacgaggacatcctggaggacatcgtgctgaccctgaccctgttcgaggaccgggagatgatcgaggagcggctgaagacctacgcccacctgttcgacgacaaggtgatgaagcagctgaagcggcggcggtacaccggctggggccggctgtcccggaagctgatcaacggcatccgggacaagcagtccggcaagaccatcctggacttcctgaagtccgacggcttcgccaaccggaacttcatgcagctgatccacgacgactccctgaccttcaaggaggacatccagaaggcccaggtgtccggccagggcgactccctgcacgagcacatcgccaacctggccggctcccccgccatcaagaagggcatcctgcagaccgtgaaggtggtggacgagctggtgaaggtgatgggccggcacaagcccgagaacatcgtgatcgagatggcccgggagaaccagaccacccagaagggccagaagaactcccgggagcggatgaagcggatcgaggagggcatcaaggagctgggctcccagatcctgaaggagcaccccgtggagaacacccagctgcagaacgagaagctgtacctgtactacctgcagaacggccgggacatgtacgtggaccaggagctggacatcaaccggctgtccgactacgacgtggaccacatcgtgccccagtccttcctgaaggacgactccatcgacaacaaggtgctgacccggtccgacaagaaccggggcaagtccgacaacgtgccctccgaggaggtggtgaagaagatgaagaactactggcggcagctgctgaacgccaagctgatcacccagcggaagttcgacaacctgaccaaggccgagcggggcggcctgtccgagctggacaaggccggcttcatcaagcggcagctggtggagacccggcagatcaccaagcacgtggcccagatcctggactcccggatgaacaccaagtacgacgagaacgacaagctgatccgggaggtgaaggtgatcaccctgaagtccaagctggtgtccgacttccggaaggacttccagttctacaaggtgcgggagatcaacaactaccaccacgcccacgacgcctacctgaacgccgtggtgggcaccgccctgatcaagaagtaccccaagctggagtccgagttcgtgtacggcgactacaaggtgtacgacgtgcggaagatgatcgccaagtccgagcaggagatcggcaaggccaccgccaagtacttcttctactccaacatcatgaacttcttcaagaccgagatcaccctggccaacggcgagatccggaagcggcccctgatcgagaccaacggcgagaccggcgagatcgtgtgggacaagggccgggacttcgccaccgtgcggaaggtgctgtccatgccccaggtgaacatcgtgaagaagaccgaggtgcagaccggcggcttctccaaggagtccatcctgcccaagcggaactccgacaagctgatcgcccggaagaaggactgggaccccaagaagtacggcggcttcgactcccccaccgtggcctactccgtgctggtggtggccaaggtggagaagggcaagtccaagaagctgaagtccgtgaaggagctgctgggcatcaccatcatggagcggtcctccttcgagaagaaccccatcgacttcctggaggccaagggctacaaggaggtgaagaaggacctgatcatcaagctgcccaagtactccctgttcgagctggagaacggccggaagcggatgctggcctccgccggcgagctgcagaagggcaacgagctggccctgccctccaagtacgtgaacttcctgtacctggcctcccactacgagaagctgaagggctcccccgaggacaacgagcagaagcagctgttcgtggagcagcacaagcactacctggacgagatcatcgagcagatctccgagttctccaagcgggtgatcctggccgacgccaacctggacaaggtgctgtccgcctacaacaagcaccgggacaagcccatccgggagcaggccgagaacatcatccacctgttcaccctgaccaacctgggcgcccccgccgccttcaagtacttcgacaccaccatcgaccggaagcggtacacctccaccaaggaggtgctggacgccaccctgatccaccagtccatcaccggcctgtacgagacccggatcgacctgtcccagctgggcggcgacggcggcggctcccccaagaagaagcggaaggtgtga

SEQ ID NO: 4 - DNA, 709 bp, Homo sapiens
  source 1..709: mol_type = other DNA
gtaagaaatccatttttctattgttcaacttttattctattttcccagtaaaataaagttttagtaaactctgcatctttaaagaattattttggcatttatttctaaaatggcatagtattttgtatttgtgaagtcttacaaggttatcttattaataaaattcaaacatcctaggtaaaaaaaaaaaaaggtcagaattgtttagtgactgtaattttcttttgcgcactaaggaaagtgcaaagtaacttagagtgactgaaacttcacagaatagggttgaagattgaattcataactatcccaaagacctatccattgcactatgctttatttaaaaaccacaaaacctgtgctgttgatctcataaatagaacttgtatttatatttattttcattttagtctgtcttcttggttgctgttgatagacactaaaagagtattagatattatctaagtttgaatataaggctataaatatttaataatttttaaaatagtattcttggtaattgaattattcttctgtttaaaggcagaagaaataattgaacatcatcctgagtttttctgtaggaatcagagcccaatattttgaaacaaatgcataatctaagtcaaatggaaagaaatataaaaagtaacattattacttcttgttttcttcagtatttaacaatccttttttttcttcccttgcccag

SEQ ID NO: 5-7 - skipped (3 entries)

SEQ ID NO: 8 - protein, 1391 aa, synthetic construct
  REGION 1..1391: note = Synthetic
MDKPKKKRKVKYSIGLDIGTNSVGWAVITDEYKVPSKKFKVLGNTDRHSIKKNLIGALLFDSGETAEATRLKRTARRRYTRRKNRICYLQEIFSNEMAKVDDSFFHRLEESFLVEEDKKHERHPIFGNIVDEVAYHEKYPTIYHLRKKLVDSTDKADLRLIYLALAHMIKFRGHFLIEGDLNPDNSDVDKLFIQLVQTYNQLFEENPINASGVDAKAILSARLSKSRRLENLIAQLPGEKKNGLFGNLIALSLGLTPNFKSNFDLAEDAKLQLSKDTYDDDLDNLLAQIGDQYADLFLAAKNLSDAILLSDILRVNTEITKAPLSASMIKRYDEHHQDLTLLKALVRQQLPEKYKEIFFDQSKNGYAGYIDGGASQEEFYKFIKPILEKMDGTEELLVKLNREDLLRKQRTFDNGSIPHQIHLGELHAILRRQEDFYPFLKDNREKIEKILTFRIPYYVGPLARGNSRFAWMTRKSEETITPWNFEEVVDKGASAQSFIERMTNFDKNLPNEKVLPKHSLLYEYFTVYNELTKVKYVTEGMRKPAFLSGEQKKAIVDLLFKTNRKVTVKQLKEDYFKKIECFDSVEISGVEDRFNASLGTYHDLLKIIKDKDFLDNEENEDILEDIVLTLTLFEDREMIEERLKTYAHLFDDKVMKQLKRRRYTGWGRLSRKLINGIRDKQSGKTILDFLKSDGFANRNFMQLIHDDSLTFKEDIQKAQVSGQGDSLHEHIANLAGSPAIKKGILQTVKVVDELVKVMGRHKPENIVIEMARENQTTQKGQKNSRERMKRIEEGIKELGSQILKEHPVENTQLQNEKLYLYYLQNGRDMYVDQELDINRLSDYDVDHIVPQSFLKDDSIDNKVLTRSDKNRGKSDNVPSEEVVKKMKNYWRQLLNAKLITQRKFDNLTKAERGGLSELDKAGFIKRQLVETRQITKHVAQILDSRMNTKYDENDKLIREVKVITLKSKLVSDFRKDFQFYKVREINNYHHAHDAYLNAVVGTALIKKYPKLESEFVYGDYKVYDVRKMIAKSEQEIGKATAKYFFYSNIMNFFKTEITLANGEIRKRPLIETNGETGEIVWDKGRDFATVRKVLSMPQVNIVKKTEVQTGGFSKESILPKRNSDKLIARKKDWDPKKYGGFDSPTVAYSVLVVAKVEKGKSKKLKSVKELLGITIMERSSFEKNPIDFLEAKGYKEVKKDLIIKLPKYSLFELENGRKRMLASAGELQKGNELALPSKYVNFLYLASHYEKLKGSPEDNEQKQLFVEQHKHYLDEIIEQISEFSKRVILADANLDKVLSAYNKHRDKPIREQAENIIHLFTLTNLGAPAAFKYFDTTIDRKRYTSTKEVLDATLIHQSITGLYETRIDLSQLGGDKRPAATKKAGQAKKKK

SEQ ID NO: 9 - DNA, 4176 bp, synthetic construct
  misc_feature 1..4176: note = Synthetic
  source 1..4176: mol_type = other DNA
atggacaagcccaagaaaaagcggaaagtgaagtacagcatcggcctggacatcggcaccaactctgtgggctgggccgtgatcaccgacgagtacaaggtgcccagcaagaaattcaaggtgctgggcaacaccgacaggcacagcatcaagaagaacctgatcggcgccctgctgttcgacagcggcgaaacagccgaggccaccagactgaagagaaccgccagaagaagatacaccaggcggaagaacaggatctgctatctgcaagagatcttcagcaacgagatggccaaggtggacgacagcttcttccacagactggaagagtccttcctggtggaagaggacaagaagcacgagagacaccccatcttcggcaacatcgtggacgaggtggcctaccacgagaagtaccccaccatctaccacctgagaaagaaactggtggacagcaccgacaaggccgacctgagactgatctacctggccctggcccacatgatcaagttcagaggccacttcctgatcgagggcgacctgaaccccgacaacagcgacgtggacaagctgttcatccagctggtgcagacctacaaccagctgttcgaggaaaaccccatcaacgccagcggcgtggacgccaaggctatcctgtctgccagactgagcaagagcagaaggctggaaaatctgatcgcccagctgcccggcgagaagaagaacggcctgttcggcaacctgattgccctgagcctgggcctgacccccaacttcaagagcaacttcgacctggccgaggatgccaaactgcagctgagcaaggacacctacgacgacgacctggacaacctgctggcccagatcggcgaccagtacgccgacctgttcctggccgccaagaacctgtctgacgccatcctgctgagcgacatcctgagagtgaacaccgagatcaccaaggcccccctgagcgcctctatgatcaagagatacgacgagcaccaccaggacctgaccctgctgaaagctctcgtgcggcagcagctgcctgagaagtacaaagaaatcttcttcgaccagagcaagaacggctacgccggctacatcgatggcggcgctagccaggaagagttctacaagttcatcaagcccatcctggaaaagatggacggcaccgaggaactgctcgtgaagctgaacagagaggacctgctgagaaagcagagaaccttcgacaacggcagcatcccccaccagatccacctgggagagctgcacgctatcctgagaaggcaggaagatttttacccattcctgaaggacaaccgggaaaagatcgagaagatcctgaccttcaggatcccctactacgtgggccccctggccagaggcaacagcagattcgcctggatgaccagaaagagcgaggaaaccatcaccccctggaacttcgaggaagtggtggacaagggcgccagcgcccagagcttcatcgagagaatgacaaacttcgataagaacctgcccaacgagaaggtgctgcccaagcacagcctgctgtacgagtacttcaccgtgtacaacgagctgaccaaagtgaaatacgtgaccgagggaatgagaaagcccgccttcctgagcggcgagcagaaaaaggccatcgtggacctgctgttcaagaccaacagaaaagtgaccgtgaagcagctgaaagaggactacttcaagaaaatcgagtgcttcgactccgtggaaatctccggcgtggaagatagattcaacgcctccctgggcacataccacgatctgctgaaaattatcaaggacaaggacttcctggataacgaagagaacgaggacattctggaagatatcgtgctgaccctgacactgtttgaggaccgcgagatgatcgaggaaaggctgaaaacctacgctcacctgttcgacgacaaagtgatgaagcagctgaagagaaggcggtacaccggctggggcaggctgagcagaaagctgatcaacggcatcagagacaagcagagcggcaagacaatcctggatttcctgaagtccgacggcttcgccaaccggaacttcatgcagctgatccacgacgacagcctgacattcaaagaggacatccagaaagcccaggtgtccggccagggcgactctctgcacgagcatatcgctaacctggccggcagccccgctatcaagaagggcatcctgcagacagtgaaggtggtggacgagctcgtgaaagtgatgggcagacacaagcccgagaacatcgtgatcgagatggctagagagaaccagaccacccagaagggacagaagaactcccgcgagaggatgaagagaatcgaagagggcatcaaagagctgggcagccagatcctgaaagaacaccccgtggaaaacacccagctgcagaacgagaagctgtacctgtactacctgcagaatggccgggatatgtacgtggaccaggaactggacatcaacagactgtccgactacgatgtggaccatatcgtgcctcagagctttctgaaggacgactccatcgataacaaagtgctgactcggagcgacaagaacagaggcaagagcgacaacgtgccctccgaagaggtcgtgaagaagatgaagaactactggcgacagctgctgaacgccaagctgattacccagaggaagttcgataacctgaccaaggccgagagaggcggcctgagcgagctggataaggccggcttcatcaagaggcagctggtggaaaccagacagatcacaaagcacgtggcacagatcctggactcccggatgaacactaagtacgacgaaaacgataagctgatccgggaagtgaaagtgatcaccctgaagtccaagctggtgtccgatttccggaaggatttccagttttacaaagtgcgcgagatcaacaactaccaccacgcccacgacgcctacctgaacgccgtcgtgggaaccgccctgatcaaaaagtaccctaagctggaaagcgagttcgtgtacggcgactacaaggtgtacgacgtgcggaagatgatcgccaagagcgagcaggaaatcggcaaggctaccgccaagtacttcttctacagcaacatcatgaactttttcaagaccgaaatcaccctggccaacggcgagatcagaaagcgccctctgatcgagacaaacggcgaaaccggggagatcgtgtgggataagggcagagacttcgccacagtgcgaaaggtgctgagcatgccccaagtgaatatcgtgaaaaagaccgaggtgcagacaggcggcttcagcaaagagtctatcctgcccaagaggaacagcgacaagctgatcgccagaaagaaggactgggaccccaagaagtacggcggcttcgacagccctaccgtggcctactctgtgctggtggtggctaaggtggaaaagggcaagtccaagaaactgaagagtgtgaaagagctgctggggatcaccatcatggaaagaagcagctttgagaagaaccctatcgactttctggaagccaagggctacaaagaagtgaaaaaggacctgatcatcaagctgcctaagtactccctgttcgagctggaaaacggcagaaagagaatgctggcctctgccggcgaactgcagaagggaaacgagctggccctgcctagcaaatatgtgaacttcctgtacctggcctcccactatgagaagctgaagggcagccctgaggacaacgaacagaaacagctgtttgtggaacagcataagcactacctggacgagatcatcgagcagatcagcgagttctccaagagagtgatcctggccgacgccaatctggacaaggtgctgtctgcctacaacaagcacagggacaagcctatcagagagcaggccgagaatatcatccacctgttcaccctgacaaacctgggcgctcctgccgccttcaagtactttgacaccaccatcgaccggaagaggtacaccagcaccaaagaggtgctggacgccaccctgatccaccagagcatcaccggcctgtacgagacaagaatcgacctgtctcagctgggaggcgacaagagacctgccgccactaagaaggccggacaggccaaaaagaagaagtga

SEQ ID NO: 10 - DNA, 4218 bp, synthetic construct
  misc_feature 1..4218: note = Synthetic
  source 1..4218: mol_type = other DNA
atggccccaaagaagaagcggaaggtcggtatccacggagtcccagcagccgacaagaagtacagcatcggcctggacatcggcaccaactctgtgggctgggccgtgatcaccgacgagtacaaggtgcccagcaagaaattcaaggtgctgggcaacaccgaccggcacagcatcaagaagaacctgatcggagccctgctgttcgacagcggcgaaacagccgaggccacccggctgaagagaaccgccagaagaagatacaccagacggaagaaccggatctgctatctgcaagagatcttcagcaacgagatggccaaggtggacgacagcttcttccacagactggaagagtccttcctggtggaagaggacaagaagcacgagagacaccccatcttcggcaacatcgtggacgaggtggcctaccacgagaagtaccccaccatctaccacctgagaaagaaactggtggacagcaccgacaaggccgacctgagactgatctacctggccctggcccacatgatcaagttcagaggccacttcctgatcgagggcgacctgaaccccgacaacagcgacgtggacaagctgttcatccagctggtgcagacctacaaccagctgttcgaggaaaaccccatcaacgccagcggcgtggacgccaaggctatcctgtctgccagactgagcaagagcagaaggctggaaaatctgatcgcccagctgcccggcgagaagaagaacggcctgttcggcaacctgattgccctgagcctgggcctgacccccaacttcaagagcaacttcgacctggccgaggatgccaaactgcagctgagcaaggacacctacgacgacgacctggacaacctgctggcccagatcggcgaccagtacgccgacctgttcctggccgccaagaacctgtctgacgccatcctgctgagcgacatcctgagagtgaacaccgagatcaccaaggcccccctgagcgcctctatgatcaagagatacgacgagcaccaccaggacctgaccctgctgaaagctctcgtgcggcagcagctgcctgagaagtacaaagaaatcttcttcgaccagagcaagaacggctacgccggctacatcgatggcggcgctagccaggaagagttctacaagttcatcaagcccatcctggaaaagatggacggcaccgaggaactgctcgtgaagctgaacagagaggacctgctgagaaagcagagaaccttcgacaacggcagcatcccccaccagatccacctgggagagctgcacgctatcctgagaaggcaggaagatttttacccattcctgaaggacaaccgggaaaagatcgagaagatcctgaccttcaggatcccctactacgtgggccccctggccagaggcaacagcagattcgcctggatgaccagaaagagcgaggaaaccatcaccccctggaacttcgaggaagtggtggacaagggcgccagcgcccagagcttcatcgagagaatgacaaacttcgataagaacctgcccaacgagaaggtgctgcccaagcacagcctgctgtacgagtacttcaccgtgtacaacgagctgaccaaagtgaaatacgtgaccgagggaatgagaaagcccgccttcctgagcggcgagcagaaaaaggccatcgtggacctgctgttcaagaccaacagaaaagtgaccgtgaagcagctgaaagaggactacttcaagaaaatcgagtgcttcgactccgtggaaatctccggcgtggaagatagattcaacgcctccctgggcacataccacgatctgctgaaaattatcaaggacaaggacttcctggataacgaagagaacgaggacattctggaagatatcgtgctgaccctgacactgtttgaggaccgcgagatgatcgaggaaaggctgaaaacctacgctcacctgttcgacgacaaagtgatgaagcagctgaagagaaggcggtacaccggctggggcaggctgagcagaaagctgatcaacggcatcagagacaagcagagcggcaagacaatcctggatttcctgaagtccgacggcttcgccaaccggaacttcatgcagctgatccacgacgacagcctgacattcaaagaggacatccagaaagcccaggtgtccggccagggcgactctctgcacgagcatatcgctaacctggccggcagccccgctatcaagaagggcatcctgcagacagtgaaggtggtggacgagctcgtgaaagtgatgggcagacacaagcccgagaacatcgtgatcgagatggctagagagaaccagaccacccagaagggacagaagaactcccgcgagaggatgaagagaatcgaagagggcatcaaagagctgggcagccagatcctgaaagaacaccccgtggaaaacacccagctgcagaacgagaagctgtacctgtactacctgcagaatggccgggatatgtacgtggaccaggaactggacatcaacagactgtccgactacgatgtggaccatatcgtgcctcagagctttctgaaggacgactccatcgataacaaagtgctgactcggagcgacaagaacagaggcaagagcgacaacgtgccctccgaagaggtcgtgaagaagatgaagaactactggcgacagctgctgaacgccaagctgattacccagaggaagttcgataacctgaccaaggccgagagaggcggcctgagcgagctggataaggccggcttcatcaagaggcagctggtggaaaccagacagatcacaaagcacgtggcacagatcctggactcccggatgaacactaagtacgacgaaaacgataagctgatccgggaagtgaaagtgatcaccctgaagtccaagctggtgtccgatttccggaaggatttccagttttacaaagtgcgcgagatcaacaactaccaccacgcccacgacgcctacctgaacgccgtcgtgggaaccgccctgatcaaaaagtaccctaagctggaaagcgagttcgtgtacggcgactacaaggtgtacgacgtgcggaagatgatcgccaagagcgagcaggaaatcggcaaggctaccgccaagtacttcttctacagcaacatcatgaactttttcaagaccgaaatcaccctggccaacggcgagatcagaaagcgccctctgatcgagacaaacggcgaaaccggggagatcgtgtgggataagggcagagacttcgccacagtgcgaaaggtgctgagcatgccccaagtgaatatcgtgaaaaagaccgaggtgcagacaggcggcttcagcaaagagtctatcctgcccaagaggaacagcgacaagctgatcgccagaaagaaggactgggaccccaagaagtacggcggcttcgacagccctaccgtggcctactctgtgctggtggtggctaaggtggaaaagggcaagtccaagaaactgaagagtgtgaaagagctgctggggatcaccatcatggaaagaagcagctttgagaagaaccctatcgactttctggaagccaagggctacaaagaagtgaaaaaggacctgatcatcaagctgcctaagtactccctgttcgagctggaaaacggcagaaagagaatgctggcctctgccggcgaactgcagaagggaaacgagctggccctgcctagcaaatatgtgaacttcctgtacctggcctcccactatgagaagctgaagggcagccctgaggacaacgaacagaaacagctgtttgtggaacagcataagcactacctggacgagatcatcgagcagatcagcgagttctccaagagagtgatcctggccgacgccaatctggacaaggtgctgtctgcctacaacaagcacagggacaagcctatcagagagcaggccgagaatatcatccacctgttcaccctgacaaacctgggcgctcctgccgccttcaagtactttgacaccaccatcgaccggaagaggtacaccagcaccaaagaggtgctggacgccaccctgatccaccagagcatcaccggcctgtacgagacaagaatcgacctgtctcagctgggaggcgacaagagacctgccgccactaagaaggccggacaggccaaaaagaagaagtgagcggccgcttaatta

SEQ ID NO: 11 - protein, 1379 aa, synthetic construct
  REGION 1..1379: note = Synthetic
MDKKYSIGLDIGTNSVGWAVITDEYKVPSKKFKVLGNTDRHSIKKNLIGALLFDSGETAEATRLKRTARRRYTRRKNRICYLQEIFSNEMAKVDDSFFHRLEESFLVEEDKKHERHPIFGNIVDEVAYHEKYPTIYHLRKKLVDSTDKADLRLIYLALAHMIKFRGHFLIEGDLNPDNSDVDKLFIQLVQTYNQLFEENPINASGVDAKAILSARLSKSRRLENLIAQLPGEKKNGLFGNLIALSLGLTPNFKSNFDLAEDAKLQLSKDTYDDDLDNLLAQIGDQYADLFLAAKNLSDAILLSDILRVNTEITKAPLSASMIKRYDEHHQDLTLLKALVRQQLPEKYKEIFFDQSKNGYAGYIDGGASQEEFYKFIKPILEKMDGTEELLVKLNREDLLRKQRTFDNGSIPHQIHLGELHAILRRQEDFYPFLKDNREKIEKILTFRIPYYVGPLARGNSRFAWMTRKSEETITPWNFEEVVDKGASAQSFIERMTNFDKNLPNEKVLPKHSLLYEYFTVYNELTKVKYVTEGMRKPAFLSGEQKKAIVDLLFKTNRKVTVKQLKEDYFKKIECFDSVEISGVEDRFNASLGTYHDLLKIIKDKDFLDNEENEDILEDIVLTLTLFEDREMIEERLKTYAHLFDDKVMKQLKRRRYTGWGRLSRKLINGIRDKQSGKTILDFLKSDGFANRNFMQLIHDDSLTFKEDIQKAQVSGQGDSLHEHIANLAGSPAIKKGILQTVKVVDELVKVMGRHKPENIVIEMARENQTTQKGQKNSRERMKRIEEGIKELGSQILKEHPVENTQLQNEKLYLYYLQNGRDMYVDQELDINRLSDYDVDHIVPQSFLKDDSIDNKVLTRSDKNRGKSDNVPSEEVVKKMKNYWRQLLNAKLITQRKFDNLTKAERGGLSELDKAGFIKRQLVETRQITKHVAQILDSRMNTKYDENDKLIREVKVITLKSKLVSDFRKDFQFYKVREINNYHHAHDAYLNAVVGTALIKKYPKLESEFVYGDYKVYDVRKMIAKSEQEIGKATAKYFFYSNIMNFFKTEITLANGEIRKRPLIETNGETGEIVWDKGRDFATVRKVLSMPQVNIVKKTEVQTGGFSKESILPKRNSDKLIARKKDWDPKKYGGFDSPTVAYSVLVVAKVEKGKSKKLKSVKELLGITIMERSSFEKNPIDFLEAKGYKEVKKDLIIKLPKYSLFELENGRKRMLASAGELQKGNELALPSKYVNFLYLASHYEKLKGSPEDNEQKQLFVEQHKHYLDEIIEQISEFSKRVILADANLDKVLSAYNKHRDKPIREQAENIIHLFTLTNLGAPAAFKYFDTTIDRKRYTSTKEVLDATLIHQSITGLYETRIDLSQLGGDGGGSPKKKRKV

SEQ ID NO: 12 - RNA, 4514 nt, synthetic construct
  misc_feature 1..4514: note = Synthetic
  source 1..4514: mol_type = other RNA
gggtcccgcagtcggcgtccagcggctctgcttgttcgtgtgtgtgtcgttgcaggccttattcggatccatggataagaagtactcaatcgggctggatatcggaactaattccgtgggttgggcagtgatcacggatgaatacaaagtgccgtccaagaagttcaaggtcctggggaacaccgatagacacagcatcaagaaaaatctcatcggagccctgctgtttgactccggcgaaaccgcagaagcgacccggctcaaacgtaccgcgaggcgacgctacacccggcggaagaatcgcatctgctatctgcaagagatcttttcgaacgaaatggcaaaggtcgacgacagcttcttccaccgcctggaagaatctttcctggtggaggaggacaagaagcatgaacggcatcctatctttggaaacatcgtcgacgaagtggcgtaccacgaaaagtacccgaccatctaccatctgcggaagaagttggttgactcaactgacaaggccgacctcagattgatctacttggccctcgcccatatgatcaaattccgcggacacttcctgatcgaaggcgatctgaaccctgataactccgacgtggataagcttttcattcaactggtgcagacctacaaccaactgttcgaagaaaacccaatcaatgctagcggcgtcgatgccaaggccatcctgtccgcccggctgtcgaagtcgcggcgcctcgaaaacctgatcgcacagctgccgggagagaaaaagaacggacttttcggcaacttgatcgctctctcactgggactcactcccaatttcaagtccaattttgacctggccgaggacgcgaagctgcaactctcaaaggacacctacgacgacgacttggacaatttgctggcacaaattggcgatcagtacgcggatctgttccttgccgctaagaacctttcggacgcaatcttgctgtccgatatcctgcgcgtgaacaccgaaataaccaaagcgccgcttagcgcctcgatgattaagcggtacgacgagcatcaccaggatctcacgctgctcaaagcgctcgtgagacagcaactgcctgaaaagtacaaggagatcttcttcgaccagtccaagaatgggtacgcagggtacatcgatggaggcgctagccaggaagagttctataagttcatcaagccaatcctggaaaagatggacggaaccgaagaactgctggtcaagctgaacagggaggatctgctccggaaacagagaacctttgacaacggatccattccccaccagatccatctgggtgagctgcacgccatcttgcggcgccaggaggacttttacccattcctcaaggacaaccgggaaaagatcgagaaaattctgacgttccgcatcccgtattacgtgggcccactggcgcgcggcaattcgcgcttcgcgtggatgactagaaaatcagaggaaaccatcactccttggaatttcgaggaagttgtggataagggagcttcggcacaaagcttcatcgaacgaatgaccaacttcgacaagaatctcccaaacgagaaggtgcttcctaagcacagcctcctttacgaatacttcactgtctacaacgaactgactaaagtgaaatacgttactgaaggaatgaggaagccggcctttctgtccggagaacagaagaaagcaattgtcgatctgctgttcaagaccaaccgcaaggtgaccgtcaagcagcttaaagaggactacttcaagaagatcgagtgtttcgactcagtggaaatcagcggggtggaggacagattcaacgcttcgctgggaacctatcatgatctcctgaagatcatcaaggacaaggacttccttgacaacgaggagaacgaggacatcctggaagatatcgtcctgaccttgacccttttcgaggatcgcgagatgatcgaggagaggcttaagacctacgctcatctcttcgacgataaggtcatgaaacaactcaagcgccgccggtacactggttggggccgcctctcccgcaagctgatcaacggtattcgcgataaacagagcggtaaaactatcctggatttcctcaaatcggatggcttcgctaatcgtaacttcatgcaattgatccacgacgacagcctgacctttaaggaggacatccaaaaagcacaagtgtccggacagggagactcactccatgaacacatcgcgaatctggccggttcgccggcgattaagaagggaattctgcaaactgtgaaggtggtcgacgagctggtgaaggtcatgggacggcacaaaccggagaatatcgtgattgaaatggcccgagaaaaccagactacccagaagggccagaaaaactcccgcgaaaggatgaagcggatcgaagaaggaatcaaggagctgggcagccagatcctgaaagagcacccggtggaaaacacgcagctgcagaacgagaagctctacctgtactatttgcaaaatggacgggacatgtacgtggaccaagagctggacatcaatcggttgtctgattacgacgtggaccacatcgttccacagtcctttctgaaggatgactcgatcgataacaaggtgttgactcgcagcgacaagaacagagggaagtcagataatgtgccatcggaggaggtcgtgaagaagatgaagaattactggcggcagctcctgaatgcgaagctgattacccagagaaagtttgacaatctcactaaagccgagcgcggcggactctcagagctggataaggctggattcatcaaacggcagctggtcgagactcggcagattaccaagcacgtggcgcagatcttggactcccgcatgaacactaaatacgacgagaacgataagctcatccgggaagtgaaggtgattaccctgaaaagcaaacttgtgtcggactttcggaaggactttcagttttacaaagtgagagaaatcaacaactaccatcacgcgcatgacgcatacctcaacgctgtggtcggtaccgccctgatcaaaaagtaccctaaacttgaatcggagtttgtgtacggagactacaaggtctacgacgtgaggaagatgatagccaagtccgaacaggaaatcgggaaagcaactgcgaaatacttcttttactcaaacatcatgaactttttcaagactgaaattacgctggccaatggagaaatcaggaagaggccactgatcgaaactaacggagaaacgggcgaaatcgtgtgggacaagggcagggacttcgcaactgttcgcaaagtgctctctatgccgcaagtcaatattgtgaagaaaaccgaagtgcaaaccggcggattttcaaaggaatcgatcctcccaaagagaaatagcgacaagctcattgcacgcaagaaagactgggacccgaagaagtacggaggattcgattcgccgactgtcgcatactccgtcctcgtggtggccaaggtggagaagggaaagagcaaaaagctcaaatccgtcaaagagctgctggggattaccatcatggaacgatcctcgttcgagaagaacccgattgatttcctcgaggcgaagggttacaaggaggtgaagaaggatctgatcatcaaactccccaagtactcactgttcgaactggaaaatggtcggaagcgcatgctggcttcggccggagaactccaaaaaggaaatgagctggccttgcctagcaagtacgtcaacttcctctatcttgcttcgcactacgaaaaactcaaagggtcaccggaagataacgaacagaagcagcttttcgtggagcagcacaagcattatctggatgaaatcatcgaacaaatctccgagttttcaaagcgcgtgatcctcgccgacgccaacctcgacaaagtcctgtcggcctacaataagcatagagataagccgatcagagaacaggccgagaacattatccacttgttcaccctgactaacctgggagccccagccgccttcaagtacttcgatactactatcgatcgcaaaagatacacgtccaccaaggaagttctggacgcgaccctgatccaccaaagcatcactggactctacgaaactaggatcgatctgtcgcagctgggtggcgatggcggtggatctccgaaaaagaagagaaaggtgtaatgagctagccatcacatttaaaagcatctcagcctaccatgagaataagagaaagaaaatgaagatcaatagcttattcatctctttttctttttcgttggtgtaaagccaacaccctgtctaaaaaacataaatttctttaatcattttgcctcttttctctgtgcttcaattaataaaaaatggaaagaacctcgagaaaaaaaaaaaaaaaaaaaaaaaaaaaaaaaaaaaaaaaaaaaaaaaaaaaaaaaaaaaaaaaaaaaaaaaaaaaaaaaaaaaaaaaaaaaaaaaaaaaatctag

SEQ ID NO: 13 - protein, 7 aa, synthetic construct
  REGION 1..7: note = Synthetic
PKKKRKV

SEQ ID NO: 14 - protein, 7 aa, synthetic construct
  REGION 1..7: note = Synthetic
PKKKRRV

SEQ ID NO: 15 - protein, 16 aa, synthetic construct
  REGION 1..16: note = Synthetic
KRPAATKKAGQAKKKK

SEQ ID NO: 16 - RNA, 16 nt, synthetic construct
  misc_feature 1..16: note = Synthetic
  source 1..16: mol_type = other RNA
gttttagagctatgct

SEQ ID NO: 17 - RNA, 22 nt, synthetic construct
  misc_feature 1..22: note = Synthetic
  source 1..22: mol_type = other RNA
gttttagagctatgctgttttg

SEQ ID NO: 18 - RNA, 67 nt, synthetic construct
  misc_feature 1..67: note = Synthetic
  source 1..67: mol_type = other RNA
agcatagcaagttaaaataaggctagtccgttatcaacttgaaaaagtggcaccgagtcggtgcttt

SEQ ID NO: 19 - RNA, 72 nt, synthetic construct
  misc_feature 1..72: note = Synthetic
  source 1..72: mol_type = other RNA
aaacagcatagcaagttaaaataaggctagtccgttatcaacttgaaaaagtggcaccgagtcggtgctttt

SEQ ID NO: 20 - RNA, 82 nt, synthetic construct
  misc_feature 1..82: note = Synthetic
  source 1..82: mol_type = other RNA
gttggaaccattcaaaacagcatagcaagttaaaataaggctagtccgttatcaacttgaaaaagtggcaccgagtcggtgc

SEQ ID NO: 21 - RNA, 77 nt, synthetic construct
  misc_feature 1..77: note = Synthetic
  source 1..77: mol_type = other RNA
gttttagagctagaaatagcaagttaaaataaggctagtccgttatcaacttgaaaaagtggcaccgagtcggtgct

SEQ ID NO: 22 - RNA, 82 nt, synthetic construct; identical to SEQ ID NO: 20
  misc_feature 1..82: note = Synthetic
  source 1..82: mol_type = other RNA

SEQ ID NO: 23 - RNA, 76 nt, synthetic construct
  misc_feature 1..76: note = Synthetic
  source 1..76: mol_type = other RNA
gttttagagctagaaatagcaagttaaaataaggctagtccgttatcaacttgaaaaagtggcaccgagtcggtgc

SEQ ID NO: 24 - RNA, 86 nt, synthetic construct
  misc_feature 1..86: note = Synthetic
  source 1..86: mol_type = other RNA
gtttaagagctatgctggaaacagcatagcaagtttaaataaggctagtccgttatcaacttgaaaaagtggcaccgagtcggtgc

SEQ ID NO: 25 - RNA, 83 nt, synthetic construct
  misc_feature 1..83: note = Synthetic
  source 1..83: mol_type = other RNA
gttttagagctagaaatagcaagttaaaataaggctagtccgttatcaacttgaaaaagtggcaccgagtcggtgcttttttt

SEQ ID NO: 26 - RNA, 80 nt, synthetic construct
  misc_feature 1..80: note = Synthetic
  source 1..80: mol_type = other RNA
gttttagagctagaaatagcaagttaaaataaggctagtccgttatcaacttgaaaaagtggcaccgagtcggtgctttt

SEQ ID NO: 27 - RNA, 92 nt, synthetic construct
  misc_feature 1..92: note = Synthetic
  source 1..92: mol_type = other RNA
gtttaagagctatgctggaaacagcatagcaagtttaaataaggctagtccgttatcaacttgaaaaagtggcaccgagtcggtgctttttt

SEQ ID NO: 28 - RNA, 68 nt, synthetic construct
  misc_feature 1..68: note = Synthetic
  source 1..68: mol_type = other RNA
gttttagagctagaaatagcaagttaaaataaggctagtccgttatcaacttggcaccgagtcggtgc

SEQ ID NO: 29 - RNA, 100 nt, synthetic construct
  misc_feature 1..100: note = Synthetic
  source 1..100: mol_type = other RNA
  misc_difference 1..20: note = n is a, c, g, or u
nnnnnnnnnnnnnnnnnnnngttttagagctagaaatagcaagttaaaataaggctagtccgttatcaacttgaaaaagtggcaccgagtcggtgctttt

SEQ ID NO: 30 - RNA, 20 nt, synthetic construct
  misc_feature 1..20: note = Synthetic
  source 1..20: mol_type = other RNA
gagcaacctcactcttgtct

SEQ ID NO: 31 - RNA, 20 nt, synthetic construct
  misc_feature 1..20: note = Synthetic
  source 1..20: mol_type = other RNA
atgcatttgtttcaaaatat

SEQ ID NO: 32 - RNA, 20 nt, synthetic construct
  misc_feature 1..20: note = Synthetic
  source 1..20: mol_type = other RNA
tgcatttgtttcaaaatatt

SEQ ID NO: 33 - RNA, 20 nt, synthetic construct
  misc_feature 1..20: note = Synthetic
  source 1..20: mol_type = other RNA
atttatgagatcaacagcac

SEQ ID NO: 34 - RNA, 20 nt, synthetic construct
  misc_feature 1..20: note = Synthetic
  source 1..20: mol_type = other RNA
gatcaacagcacaggttttg

SEQ ID NO: 35 - RNA, 20 nt, synthetic construct
  misc_feature 1..20: note = Synthetic
  source 1..20: mol_type = other RNA
ttaaataaagcatagtgcaa

SEQ ID NO: 36 - RNA, 20 nt, synthetic construct
  misc_feature 1..20: note = Synthetic
  source 1..20: mol_type = other RNA
taaagcatagtgcaatggat

SEQ ID NO: 37 - RNA, 20 nt, synthetic construct
  misc_feature 1..20: note = Synthetic
  source 1..20: mol_type = other RNA
tagtgcaatggataggtctt

SEQ ID NO: 38 - RNA, 20 nt, synthetic construct
  misc_feature 1..20: note = Synthetic
  source 1..20: mol_type = other RNA
tactaaaactttattttact

SEQ ID NO: 39 - RNA, 20 nt, synthetic construct
  misc_feature 1..20: note = Synthetic
  source 1..20: mol_type = other RNA
aaagttgaacaatagaaaaa

SEQ ID NO: 40 - RNA, 20 nt, synthetic construct
  misc_feature 1..20: note = Synthetic
  source 1..20: mol_type = other RNA
aatgcataatctaagtcaaa

SEQ ID NO: 41 - RNA, 20 nt, synthetic construct
  misc_feature 1..20: note = Synthetic
  source 1..20: mol_type = other RNA
taataaaattcaaacatcct

SEQ ID NO: 42 - RNA, 20 nt, synthetic construct
  misc_feature 1..20: note = Synthetic
  source 1..20: mol_type = other RNA
gcatctttaaagaattattt

SEQ ID NO: 43 - RNA, 20 nt, synthetic construct
  misc_feature 1..20: note = Synthetic
  source 1..20: mol_type = other RNA
tttggcatttatttctaaaa

SEQ ID NO: 44 - RNA, 20 nt, synthetic construct
  misc_feature 1..20: note = Synthetic
  source 1..20: mol_type = other RNA
tgtatttgtgaagtcttaca

SEQ ID NO: 45 - RNA, 20 nt, synthetic construct
  misc_feature 1..20: note = Synthetic
  source 1..20: mol_type = other RNA
tcctaggtaaaaaaaaaaaa

SEQ ID NO: 46 - RNA, 20 nt, synthetic construct
  misc_feature 1..20: note = Synthetic
  source 1..20: mol_type = other RNA
taattttcttttgcgcacta

SEQ ID NO: 47 - RNA, 20 nt, synthetic construct
  misc_feature 1..20: note = Synthetic
  source 1..20: mol_type = other RNA
tgactgaaacttcacagaat

SEQ ID NO: 48 - RNA, 20 nt, synthetic construct
  misc_feature 1..20: note = Synthetic
  source 1..20: mol_type = other RNA
gactgaaacttcacagaata

SEQ ID NO: 49 - RNA, 20 nt, synthetic construct
  misc_feature 1..20: note = Synthetic
  source 1..20: mol_type = other RNA
ttcattttagtctgtcttct

SEQ ID NO: 50 - RNA, 20 nt, synthetic construct
  misc_feature 1..20: note = Synthetic
  source 1..20: mol_type = other RNA
attatctaagtttgaatata

SEQ ID NO: 51 - RNA, 20 nt, synthetic construct
  misc_feature 1..20: note = Synthetic
  source 1..20: mol_type = other RNA
aatttttaaaatagtattct

SEQ ID NO: 52 - RNA, 20 nt, synthetic construct
  misc_feature 1..20: note = Synthetic
  source 1..20: mol_type = other RNA
tgaattattcttctgtttaa

SEQ ID NO: 53 - RNA, 20 nt, synthetic construct
  misc_feature 1..20: note = Synthetic
  source 1..20: mol_type = other RNA
atcatcctgagtttttctgt

SEQ ID NO: 54 - RNA, 20 nt, synthetic construct
  misc_feature 1..20: note = Synthetic
  source 1..20: mol_type = other RNA
ttactaaaactttattttac

SEQ ID NO: 55 - RNA, 20 nt, synthetic construct
  misc_feature 1..20: note = Synthetic
  source 1..20: mol_type = other RNA
acctttttttttttttacct

SEQ ID NO: 56 - RNA, 20 nt, synthetic construct
  misc_feature 1..20: note = Synthetic
  source 1..20: mol_type = other RNA
agtgcaatggataggtcttt

SEQ ID NO: 57 - RNA, 20 nt, synthetic construct
  misc_feature 1..20: note = Synthetic
  source 1..20: mol_type = other RNA
tgattcctacagaaaaactc

SEQ ID NO: 58 - RNA, 20 nt, synthetic construct
  misc_feature 1..20: note = Synthetic
  source 1..20: mol_type = other RNA
tgggcaagggaagaaaaaaa

SEQ ID NO: 59 - RNA, 20 nt, synthetic construct
  misc_feature 1..20: note = Synthetic
  source 1..20: mol_type = other RNA
cctcactcttgtctgggcaa

SEQ ID NO: 60 - RNA, 20 nt, synthetic construct
  misc_feature 1..20: note = Synthetic
  source 1..20: mol_type = other RNA
acctcactcttgtctgggca

SEQ ID NO: 61 - RNA, 20 nt, synthetic construct
  misc_feature 1..20: note = Synthetic
  source 1..20: mol_type = other RNA
tgagcaacctcactcttgtc

SEQ ID NO: 62 - RNA, 100 nt, synthetic construct
  misc_feature 1..100: note = Synthetic
  source 1..100: mol_type = other RNA
gagcaacctcactcttgtctgttttagagctagaaatagcaagttaaaataaggctagtccgttatcaacttgaaaaagtggcaccgagtcggtgctttt

SEQ ID NO: 63 - RNA, 100 nt, synthetic construct
  misc_feature 1..100: note = Synthetic
  source 1..100: mol_type = other RNA
atgcatttgtttcaaaatatgttttagagctagaaatagcaagttaaaataaggctagtccgttatcaacttgaaaaagtggcaccgagtcggtgctttt

SEQ ID NO: 64 - RNA, 100 nt, synthetic construct
  misc_feature 1..100: note = Synthetic
  source 1..100: mol_type = other RNA
tgcatttgtttcaaaatattgttttagagctagaaatagcaagttaaaataaggctagtccgttatcaacttgaaaaagtggcaccgagtcggtgctttt

SEQ ID NO: 65 - RNA, 100 nt, synthetic construct
  misc_feature 1..100: note = Synthetic
  source 1..100: mol_type = other RNA
atttatgagatcaacagcacgttttagagctagaaatagcaagttaaaataaggctagtccgttatcaacttgaaaaagtggcaccgagtcggtgctttt

SEQ ID NO: 66 - RNA, 100 nt, synthetic construct
  misc_feature 1..100: note = Synthetic
  source 1..100: mol_type = other RNA
gatcaacagcacaggttttggttttagagctagaaatagcaagttaaaataaggctagtccgttatcaacttgaaaaagtggcaccgagtcggtgctttt

SEQ ID NO: 67 - RNA, 100 nt, synthetic construct
  misc_feature 1..100: note = Synthetic
  source 1..100: mol_type = other RNA
ttaaataaagcatagtgcaagttttagagctagaaatagcaagttaaaataaggctagtccgttatcaacttgaaaaagtggcaccgagtcggtgctttt

SEQ ID NO: 68 - RNA, 100 nt, synthetic construct
  misc_feature 1..100: note = Synthetic
  source 1..100: mol_type = other RNA
taaagcatagtgcaatggatgttttagagctagaaatagcaagttaaaataaggctagtccgttatcaacttgaaaaagtggcaccgagtcggtgctttt

SEQ ID NO: 69 - RNA, 100 nt, synthetic construct
  misc_feature 1..100: note = Synthetic
  source 1..100: mol_type = other RNA
tagtgcaatggataggtcttgttttagagctagaaatagcaagttaaaataaggctagtccgttatcaacttgaaaaagtggcaccgagtcggtgctttt

SEQ ID NO: 70 - RNA, 100 nt, synthetic construct
  misc_feature 1..100: note = Synthetic
  source 1..100: mol_type = other RNA
tactaaaactttattttactgttttagagctagaaatagcaagttaaaataaggctagtccgttatcaacttgaaaaagtggcaccgagtcggtgctttt

SEQ ID NO: 71 - RNA, 100 nt, synthetic construct
  misc_feature 1..100: note = Synthetic
  source 1..100: mol_type = other RNA
aaagttgaacaatagaaaaagttttagagctagaaatagcaagttaaaataaggctagtccgttatcaacttgaaaaagtggcaccgagtcggtgctttt

SEQ ID NO: 72 - RNA, 100 nt, synthetic construct
  misc_feature 1..100: note = Synthetic
  source 1..100: mol_type = other RNA
aatgcataatctaagtcaaagttttagagctagaaatagcaagttaaaataaggctagtccgttatcaacttgaaaaagtggcaccgagtcggtgctttt

SEQ ID NO: 73 - RNA, 100 nt, synthetic construct
  misc_feature 1..100: note = Synthetic
  source 1..100: mol_type = other RNA
taataaaattcaaacatcctgttttagagctagaaatagcaagttaaaataaggctagtccgttatcaacttgaaaaagtggcaccgagtcggtgctttt

SEQ ID NO: 74 - RNA, 100 nt, synthetic construct
  misc_feature 1..100: note = Synthetic
  source 1..100: mol_type = other RNA
gcatctttaaagaattatttgttttagagctagaaatagcaagttaaaataaggctagtccgttatcaacttgaaaaagtggcaccgagtcggtgctttt

SEQ ID NO: 75 - RNA, 100 nt, synthetic construct
  misc_feature 1..100: note = Synthetic
  source 1..100: mol_type = other RNA
tttggcatttatttctaaaagttttagagctagaaatagcaagttaaaataaggctagtccgttatcaacttgaaaaagtggcaccgagtcggtgctttt

SEQ ID NO: 76 - RNA, 100 nt, synthetic construct
  misc_feature 1..100: note = Synthetic
  source 1..100: mol_type = other RNA
tgtatttgtgaagtcttacagttttagagctagaaatagcaagttaaaataaggctagtccgttatcaacttgaaaaagtggcaccgagtcggtgctttt

SEQ ID NO: 77 - RNA, 100 nt, synthetic construct
  misc_feature 1..100: note = Synthetic
  source 1..100: mol_type = other RNA
tcctaggtaaaaaaaaaaaagttttagagctagaaatagcaagttaaaataaggctagtccgttatcaacttgaaaaagtggcaccgagtcggtgctttt

SEQ ID NO: 78 - RNA, 100 nt, synthetic construct
  misc_feature 1..100: note = Synthetic
  source 1..100: mol_type = other RNA
taattttcttttgcgcactagttttagagctagaaatagcaagttaaaataaggctagtccgttatcaacttgaaaaagtggcaccgagtcggtgctttt

SEQ ID NO: 79 - RNA, 100 nt, synthetic construct
  misc_feature 1..100: note = Synthetic
  source 1..100: mol_type = other RNA
tgactgaaacttcacagaatgttttagagctagaaatagcaagttaaaataaggctagtccgttatcaacttgaaaaagtggcaccgagtcggtgctttt

SEQ ID NO: 80 - RNA, 100 nt, synthetic construct
  misc_feature 1..100: note = Synthetic
  source 1..100: mol_type = other RNA
gactgaaacttcacagaatagttttagagctagaaatagcaagttaaaataaggctagtccgttatcaacttgaaaaagtggcaccgagtcggtgctttt

SEQ ID NO: 81 - RNA, 100 nt, synthetic construct
  misc_feature 1..100: note = Synthetic
  source 1..100: mol_type = other RNA
ttcattttagtctgtcttctgttttagagctagaaatagcaagttaaaataaggctagtccgttatcaacttgaaaaagtggcaccgagtcggtgctttt

SEQ ID NO: 82 - RNA, 100 nt, synthetic construct
  misc_feature 1..100: note = Synthetic
  source 1..100: mol_type = other RNA
attatctaagtttgaatatagttttagagctagaaatagcaagttaaaataaggctagtccgttatcaacttgaaaaagtggcaccgagtcggtgctttt

SEQ ID NO: 83 - RNA, 100 nt, synthetic construct
  misc_feature 1..100: note = Synthetic
  source 1..100: mol_type = other RNA
aatttttaaaatagtattctgttttagagctagaaatagcaagttaaaataaggctagtccgttatcaacttgaaaaagtggcaccgagtcggtgctttt

SEQ ID NO: 84 - RNA, 100 nt, synthetic construct
  misc_feature 1..100: note = Synthetic
  source 1..100: mol_type = other RNA
tgaattattcttctgtttaagttttagagctagaaatagcaagttaaaataaggctagtccgttatcaacttgaaaaagtggcaccgagtcggtgctttt

SEQ ID NO: 85 - RNA, 100 nt, synthetic construct
  misc_feature 1..100: note = Synthetic
  source 1..100: mol_type = other RNA
atcatcctgagtttttctgtgttttagagctagaaatagcaagttaaaataaggctagtccgttatcaacttgaaaaagtggcaccgagtcggtgctttt

SEQ ID NO: 86 - RNA, 100 nt, synthetic construct
  misc_feature 1..100: note = Synthetic
  source 1..100: mol_type = other RNA
ttactaaaactttattttacgttttagagctagaaatagcaagttaaaataaggctagtccgttatcaacttgaaaaagtggcaccgagtcggtgctttt

SEQ ID NO: 87 - RNA, 100 nt, synthetic construct
  misc_feature 1..100: note = Synthetic
  source 1..100: mol_type = other RNA
acctttttttttttttacctgttttagagctagaaatagcaagttaaaataaggctagtccgttatcaacttgaaaaagtggcaccgagtcggtgctttt

SEQ ID NO: 88 - RNA, 100 nt, synthetic construct
  misc_feature 1..100: note = Synthetic
  source 1..100: mol_type = other RNA
agtgcaatggataggtctttgttttagagctagaaatagcaagttaaaataaggctagtccgttatcaacttgaaaaagtggcaccgagtcggtgctttt

SEQ ID NO: 89 - RNA, 100 nt, synthetic construct
  misc_feature 1..100: note = Synthetic
  source 1..100: mol_type = other RNA
tgattcctacagaaaaactcgttttagagctagaaatagcaagttaaaataaggctagtccgttatcaacttgaaaaagtggcaccgagtcggtgctttt

SEQ ID NO: 90 - RNA, 100 nt, synthetic construct
  misc_feature 1..100: note = Synthetic
  source 1..100: mol_type = other RNA
tgggcaagggaagaaaaaaagttttagagctagaaatagcaagttaaaataaggctagtccgttatcaacttgaaaaagtggcaccgagtcggtgctttt

SEQ ID NO: 91 - RNA, 100 nt, synthetic construct
  misc_feature 1..100: note = Synthetic
  source 1..100: mol_type = other RNA
cctcactcttgtctgggcaagttttagagctagaaatagcaagttaaaataaggctagtccgttatcaacttgaaaaagtggcaccgagtcggtgctttt

SEQ ID NO: 92 - RNA, 100 nt, synthetic construct
  misc_feature 1..100: note = Synthetic
  source 1..100: mol_type = other RNA
acctcactcttgtctgggcagttttagagctagaaatagcaagttaaaataaggctagtccgttatcaacttgaaaaagtggcaccgagtcggtgctttt

SEQ ID NO: 93 - RNA, 100 nt, synthetic construct
  misc_feature 1..100: note = Synthetic
  source 1..100: mol_type = other RNA
tgagcaacctcactcttgtcgttttagagctagaaatagcaagttaaaataaggctagtccgttatcaacttgaaaaagtggcaccgagtcggtgctttt

SEQ ID NO: 94 - RNA, 100 nt, synthetic construct; identical to SEQ ID NO: 62
  misc_feature 1..100: note = Synthetic
  source 1..100: mol_type = other RNA

SEQ ID NO: 95 - RNA, 100 nt, synthetic construct; identical to SEQ ID NO: 63
  misc_feature 1..100: note = Synthetic
  source 1..100: mol_type = other RNA

SEQ ID NO: 96 - RNA, 100 nt, synthetic construct; identical to SEQ ID NO: 64
  misc_feature 1..100: note = Synthetic
  source 1..100: mol_type = other RNA

SEQ ID NO: 97 - RNA, 100 nt, synthetic construct; identical to SEQ ID NO: 65
  misc_feature 1..100: note = Synthetic
  source 1..100: mol_type = other RNA

SEQ ID NO: 98 - RNA, 100 nt, synthetic construct; identical to SEQ ID NO: 66
  misc_feature 1..100: note = Synthetic
  source 1..100: mol_type = other RNA

SEQ ID NO: 99 - RNA, 100 nt, synthetic construct; identical to SEQ ID NO: 67
  misc_feature 1..100: note = Synthetic
  source 1..100: mol_type = other RNA

SEQ ID NO: 100 - RNA, 100 nt, synthetic construct; identical to SEQ ID NO: 68
  misc_feature 1..100: note = Synthetic
  source 1..100: mol_type = other RNA

SEQ ID NO: 101 - RNA, 100 nt, synthetic construct; identical to SEQ ID NO: 69
  misc_feature 1..100: note = Synthetic
  source 1..100: mol_type = other RNA

SEQ ID NO: 102 - RNA, 100 nt, synthetic construct; identical to SEQ ID NO: 70
  misc_feature 1..100: note = Synthetic
  source 1..100: mol_type = other RNA

SEQ ID NO: 103 - RNA, 100 nt, synthetic construct; identical to SEQ ID NO: 71
  misc_feature 1..100: note = Synthetic
  source 1..100: mol_type = other RNA

SEQ ID NO: 104 - RNA, 100 nt, synthetic construct; identical to SEQ ID NO: 72
  misc_feature 1..100: note = Synthetic
  source 1..100: mol_type = other RNA

SEQ ID NO: 105 - RNA, 100 nt, synthetic construct; identical to SEQ ID NO: 73
  misc_feature 1..100: note = Synthetic
  source 1..100: mol_type = other RNA

SEQ ID NO: 106 - RNA, 100 nt, synthetic construct; identical to SEQ ID NO: 74
  misc_feature 1..100: note = Synthetic
  source 1..100: mol_type = other RNA

SEQ ID NO: 107 - RNA, 100 nt, synthetic construct; identical to SEQ ID NO: 75
  misc_feature 1..100: note = Synthetic
  source 1..100: mol_type = other RNA

SEQ ID NO: 108 - RNA, 100 nt, synthetic construct; identical to SEQ ID NO: 76
  misc_feature 1..100: note = Synthetic
  source 1..100: mol_type = other RNA

SEQ ID NO: 109 - RNA, 100 nt, synthetic construct; identical to SEQ ID NO: 77
  misc_feature 1..100: note = Synthetic
  source 1..100: mol_type = other RNA

SEQ ID NO: 110 - RNA, 100 nt, synthetic construct; identical to SEQ ID NO: 78
  misc_feature 1..100: note = Synthetic
  source 1..100: mol_type = other RNA

SEQ ID NO: 111 - RNA, 100 nt, synthetic construct; identical to SEQ ID NO: 79
  misc_feature 1..100: note = Synthetic
  source 1..100: mol_type = other RNA

SEQ ID NO: 112 - RNA, 100 nt, synthetic construct; identical to SEQ ID NO: 80
  misc_feature 1..100: note = Synthetic
  source 1..100: mol_type = other RNA

SEQ ID NO: 113 - RNA, 100 nt, synthetic construct; identical to SEQ ID NO: 81
  misc_feature 1..100: note = Synthetic
  source 1..100: mol_type = other RNA

SEQ ID NO: 114 - RNA, 100 nt, synthetic construct; identical to SEQ ID NO: 82
  misc_feature 1..100: note = Synthetic
  source 1..100: mol_type = other RNA

SEQ ID NO: 115 - RNA, 100 nt, synthetic construct; identical to SEQ ID NO: 83
  misc_feature 1..100: note = Synthetic
  source 1..100: mol_type = other RNA

SEQ ID NO: 116 - RNA, 100 nt, synthetic construct; identical to SEQ ID NO: 84
  misc_feature 1..100: note = Synthetic
  source 1..100: mol_type = other RNA

SEQ ID NO: 117 - RNA, 100 nt, synthetic construct; identical to SEQ ID NO: 85
  misc_feature 1..100: note = Synthetic
  source 1..100: mol_type = other RNA

SEQ ID NO: 118 - RNA, 100 nt, synthetic construct; identical to SEQ ID NO: 86
  misc_feature 1..100: note = Synthetic
  source 1..100: mol_type = other RNA

SEQ ID NO: 119 - RNA, 100 nt, synthetic construct; identical to SEQ ID NO: 87
  misc_feature 1..100: note = Synthetic
  source 1..100: mol_type = other RNA

SEQ ID NO: 120 - RNA, 100 nt, synthetic construct; identical to SEQ ID NO: 88
  misc_feature 1..100: note = Synthetic
  source 1..100: mol_type = other RNA

SEQ ID NO: 121 - RNA, 100 nt, synthetic construct; identical to SEQ ID NO: 89
  misc_feature 1..100: note = Synthetic
  source 1..100: mol_type = other RNA

SEQ ID NO: 122 - RNA, 100 nt, synthetic construct; identical to SEQ ID NO: 90
  misc_feature 1..100: note = Synthetic
  source 1..100: mol_type = other RNA

SEQ ID NO: 123 - RNA, 100 nt, synthetic construct; identical to SEQ ID NO: 91
  misc_feature 1..100: note = Synthetic
  source 1..100: mol_type = other RNA

SEQ ID NO: 124 - RNA, 100 nt, synthetic construct; identical to SEQ ID NO: 92
  misc_feature 1..100: note = Synthetic
  source 1..100: mol_type = other RNA

SEQ ID NO: 125 - RNA, 100 nt, synthetic construct; identical to SEQ ID NO: 93
  misc_feature 1..100: note = Synthetic
  source 1..100: mol_type = other RNA

SEQ ID NO: 126 - DNA, 20 bp, synthetic construct
  misc_feature 1..20: note = Synthetic
  source 1..20: mol_type = other DNA
gagcaacctcactcttgtct

SEQ ID NO: 127 - DNA, 20 bp, synthetic construct
  misc_feature 1..20: note = Synthetic
  source 1..20: mol_type = other DNA
atgcatttgtttcaaaatat

SEQ ID NO: 128 - DNA, 20 bp, synthetic construct
  misc_feature 1..20: note = Synthetic
  source 1..20: mol_type = other DNA
tgcatttgtttcaaaatatt

SEQ ID NO: 129 - DNA, 20 bp, synthetic construct
  misc_feature 1..20: note = Synthetic
  source 1..20: mol_type = other DNA
atttatgagatcaacagcac

SEQ ID NO: 130 - DNA, 20 bp, synthetic construct
  misc_feature 1..20: note = Synthetic
  source 1..20: mol_type = other DNA
gatcaacagcacaggttttg

SEQ ID NO: 131 - DNA, 20 bp, synthetic construct
  misc_feature 1..20: note = Synthetic
  source 1..20: mol_type = other DNA
ttaaataaagcatagtgcaa

SEQ ID NO: 132 - DNA, 20 bp, synthetic construct
  misc_feature 1..20: note = Synthetic
  source 1..20: mol_type = other DNA
taaagcatagtgcaatggat

SEQ ID NO: 133 - DNA, 20 bp, synthetic construct
  misc_feature 1..20: note = Synthetic
  source 1..20: mol_type = other DNA
tagtgcaatggataggtctt

SEQ ID NO: 134 - DNA, 20 bp, synthetic construct
  misc_feature 1..20: note = Synthetic
  source 1..20: mol_type = other DNA
tactaaaactttattttact

SEQ ID NO: 135 - DNA, 20 bp, synthetic construct
  misc_feature 1..20: note = Synthetic
  source 1..20: mol_type = other DNA
aaagttgaacaatagaaaaa

SEQ ID NO: 136 - DNA, 20 bp, synthetic construct
  misc_feature 1..20: note = Synthetic
  source 1..20: mol_type = other DNA
aatgcataatctaagtcaaa

SEQ ID NO: 137 - DNA, 20 bp, synthetic construct
  misc_feature 1..20: note = Synthetic
  source 1..20: mol_type = other DNA
taataaaattcaaacatcct

SEQ ID NO: 138 - DNA, 20 bp, synthetic construct
  misc_feature 1..20: note = Synthetic
  source 1..20: mol_type = other DNA
gcatctttaaagaattattt

SEQ ID NO: 139 - DNA, 20 bp, synthetic construct
  misc_feature 1..20: note = Synthetic
  source 1..20: mol_type = other DNA
tttggcatttatttctaaaa

SEQ ID NO: 140 - DNA, 20 bp, synthetic construct
  misc_feature 1..20: note = Synthetic
  source 1..20: mol_type = other DNA
tgtatttgtgaagtcttaca

SEQ ID NO: 141 - DNA, 20 bp, synthetic construct
  misc_feature 1..20: note = Synthetic
  source 1..20: mol_type = other DNA
tcctaggtaaaaaaaaaaaa

SEQ ID NO: 142 - DNA, 20 bp, synthetic construct
  misc_feature 1..20: note = Synthetic
  source 1..20: mol_type = other DNA
taattttcttttgcgcacta

SEQ ID NO: 143 - DNA, 20 bp, synthetic construct
  misc_feature 1..20: note = Synthetic
  source 1..20: mol_type = other DNA
tgactgaaacttcacagaat

SEQ ID NO: 144 - DNA, 20 bp, synthetic construct
  misc_feature 1..20: note = Synthetic
  source 1..20: mol_type = other DNA
gactgaaacttcacagaata

SEQ ID NO: 145 - DNA, 20 bp, synthetic construct
  misc_feature 1..20: note = Synthetic
  source 1..20: mol_type = other DNA
ttcattttagtctgtcttct

SEQ ID NO: 146 - DNA, 20 bp, synthetic construct
  misc_feature 1..20: note = Synthetic
  source 1..20: mol_type = other DNA
attatctaagtttgaatata

SEQ ID NO: 147 - DNA, 20 bp, synthetic construct
  misc_feature 1..20: note = Synthetic
  source 1..20: mol_type = other DNA
aatttttaaaatagtattct

SEQ ID NO: 148 - DNA, 20 bp, synthetic construct
  misc_feature 1..20: note = Synthetic
  source 1..20: mol_type = other DNA
tgaattattcttctgtttaa

SEQ ID NO: 149 - DNA, 20 bp, synthetic construct
  misc_feature 1..20: note = Synthetic
  source 1..20: mol_type = other DNA
atcatcctgagtttttctgt

SEQ ID NO: 150 - DNA, 20 bp, synthetic construct
  misc_feature 1..20: note = Synthetic
  source 1..20: mol_type = other DNA
ttactaaaactttattttac

SEQ ID NO: 151 - DNA, 20 bp, synthetic construct
  misc_feature 1..20: note = Synthetic
  source 1..20: mol_type = other DNA
acctttttttttttttacct

SEQ ID NO: 152 - DNA, 20 bp, synthetic construct
  misc_feature 1..20: note = Synthetic
  source 1..20: mol_type = other DNA
agtgcaatggataggtcttt

SEQ ID NO: 153 - DNA, 20 bp, synthetic construct
  misc_feature 1..20: note = Synthetic
  source 1..20: mol_type = other DNA
tgattcctacagaaaaactc

SEQ ID NO: 154 - DNA, 20 bp, synthetic construct
  misc_feature 1..20: note = Synthetic
  source 1..20: mol_type = other DNA
tgggcaagggaagaaaaaaa

SEQ ID NO: 155 - DNA, 20 bp, synthetic construct
  misc_feature 1..20: note = Synthetic
  source 1..20: mol_type = other DNA
cctcactcttgtctgggcaa

SEQ ID NO: 156 - DNA, 20 bp, synthetic construct
  misc_feature 1..20: note = Synthetic
  source 1..20: mol_type = other DNA
acctcactcttgtctgggca

SEQ ID NO: 157 - DNA, 20 bp, synthetic construct
  misc_feature 1..20: note = Synthetic
  source 1..20: mol_type = other DNA
tgagcaacctcactcttgtc

SEQ ID NO: 158 - DNA, 145 bp, synthetic construct
  misc_feature 1..145: note = Synthetic
  source 1..145: mol_type = other DNA
ttggccactccctctctgcgcgctcgctcgctcactgaggccgggcgaccaaaggtcgcccgacgcccgggctttgcccgggcggcctcagtgagcgagcgagcgcgcagagagggagtggccaactccatcactaggggttcct

SEQ ID NO: 159 - DNA, 141 bp, synthetic construct
  misc_feature 1..141: note = Synthetic
  source 1..141: mol_type = other DNA
cctgcaggcagctgcgcgctcgctcgctcactgaggccgcccgggcaaagcccgggcgtcgggcgacctttggtcgcccggcctcagtgagcgagcgagcgcgcagagagggagtggccaactccatcactaggggttcct

SEQ ID NO: 160 - DNA, 130 bp, synthetic construct
  misc_feature 1..130: note = Synthetic
  source 1..130: mol_type = other DNA
ctgcgcgctcgctcgctcactgaggccgcccgggcaaagcccgggcgtcgggcgacctttggtcgcccggcctcagtgagcgagcgagcgcgcagagagggagtggccaactccatcactaggggttcct

SEQ ID NO: 161 - DNA, 131 bp, synthetic construct
  misc_feature 1..131: note = Synthetic
  source 1..131: mol_type = other DNA
cagacatgataagatacattgatgagtttggacaaaccacaactagaatgcagtgaaaaaaatgctttatttgtgaaatttgtgatgctattgctttatttgtaaccattataagctgcaataaacaagtt

SEQ ID NO: 162 - DNA, 224 bp, synthetic construct
  misc_feature 1..224: note = Synthetic
  source 1..224: mol_type = other DNA
ctgtgccttctagttgccagccatctgttgtttgcccctcccccttgccttccttgaccctggaaggtgccactcccactgtcctttcctaataaaatgaggaaattgcatcacattgtctgagtaggtgtcattctattctggggggtggggtggggcaggacagcaagggggaggattgggaagacaatagcaggcatgctggggatgcagtgggctctatg

SEQ ID NO: 163 - DNA, 100 bp, synthetic construct
  misc_feature 1..100: note = Synthetic
  source 1..100: mol_type = other DNA
taggtcagtgaagagaagaacaaaaagcagcatattacagttagttgtcttcatcaatctttaaatatgttgtgtggtttttctctccctgtttccacag

SEQ ID NO: 164 - RNA, 20 nt, synthetic construct
  misc_feature 1..20: note = Synthetic
  source 1..20: mol_type = other RNA
cactcttgtctgtggaaaca

SEQ ID NO: 165 - DNA, 20 bp, synthetic construct
  misc_feature 1..20: note = Synthetic
  source 1..20: mol_type = other DNA
cactcttgtctgtggaaaca

SEQ ID NO: 166 - RNA, 100 nt, synthetic construct
  misc_feature 1..100: note = Synthetic
  source 1..100: mol_type = other RNA
cactcttgtctgtggaaacagttttagagctagaaatagcaagttaaaataaggctagtccgttatcaacttgaaaaagtggcaccgagtcggtgctttt

SEQ ID NO: 167 - RNA, 100 nt, synthetic construct; identical to SEQ ID NO: 166
  misc_feature 1..100: note = Synthetic
  source 1..100: mol_type = other RNA

SEQ ID NO: 168 - DNA, 145 bp, synthetic construct
  misc_feature 1..145: note = Synthetic
  source 1..145: mol_type = other DNA
aggaacccctagtgatggagttggccactccctctctgcgcgctcgctcgctcactgaggccgcccgggcaaagcccgggcgtcgggcgacctttggtcgcccggcctcagtgagcgagcgagcgcgcagagagggagtggccaa

SEQ ID NO: 169 - DNA, 230 bp, synthetic construct
  misc_feature 1..230: note = Synthetic
  source 1..230: mol_type = other DNA
taatcagccataccacatttgtagaggttttacttgctttaaaaaacctcccacacctccccctgaacctgaaacataaaatgaatgcaattgttgttgttaacttgtttattgcagcttataatggttacaaataaagcaatagcatcacaaatttcacaaataaagcatttttttcactgcattctagttgtggtttgtccaaactcatcaatgtatcttatcatgtc

SEQ ID NO: 170 - protein, 952 aa, Homo sapiens
MGVRHPPCSHRLLAVCALVSLATAALLGHILLHDFLLVPRELSGSSPVLEETHPAHQQGASRPGPRDAQAHPGRPRAVPTQCDVPPNSRFDCAPDKAITQEQCEARGCCYIPAKQGLQGAQMGQPWCFFPPSYPSYKLENLSSSEMGYTATLTRTTPTFFPKDILTLRLDVMMETENRLHFTIKDPANRRYEVPLETPHVHSRAPSPLYSVEFSEEPFGVIVRRQLDGRVLLNTTVAPLFFADQFLQLSTSLPSQYITGLAEHLSPLMLSTSWTRITLWNRDLAPTPGANLYGSHPFYLALEDGGSAHGVFLLNSNAMDVVLQPSPALSWRSTGGILDVYIFLGPEPKSVVQQYLDVVGYPFMPPYWGLGFHLCRWGYSSTAITRQVVENMTRAHFPLDVQWNDLDYMDSRRDFTFNKDGFRDFPAMVQELHQGGRRYMMIVDPAISSSGPAGSYRPYDEGLRRGVFITNETGQPLIGKVWPGSTAFPDFTNPTALAWWEDMVAEFHDQVPFDGMWIDMNEPSNFIRGSEDGCPNNELENPPYVPGVVGGTLQAATICASSHQFLSTHYNLHNLYGLTEAIASHRALVKARGTRPFVISRSTFAGHGRYAGHWTGDVWSSWEQLASSVPEILQFNLLGVPLVGADVCGFLGNTSEELCVRWTQLGAFYPFMRNHNSLLSLPQEPYSFSEPAQQAMRKALTLRYALLPHLYTLFHQAHVAGETVARPLFLEFPKDSSTWTVDHQLLWGEALLITPVLQAGKAEVTGYFPLGTWYDLQTVPVEALGSLPPPPAAPREPAIHSEGQWVTLPAPLDTINVHLRAGYIIPLQGPGLTTTESRQQPMALAVALTKGGEARGELFWDDGESLEVLERGAYTQVIFLARNNTIVNELVRVTSEGAGLQLQKVTVLGVATAPQQVLSNGVPVSNFTYSPDTKVLDICVSLLMGEQFLVSWC

SEQ ID NO: 171 - DNA, 3751 bp, Homo sapiens
  source 1..3751: mol_type = other DNA
cgaccccggagtctccgcgggcggccagggcgcgcgtgcgcggaggtgagccgggccggggctgcggggcttccctgagcgcgggccgggtcggtggggcggtcggctgcccgcgcggcctctcagttgggaaagctgaggttgtcgccggggccgcgggtggaggtcggggatgaggcagcaggtaggacagtgacctcggtgacgcgaaggaccccggccacctctaggttctcctcgtccgcccgttgttcagcgagggaggctctgcgcgtgccgcagctgacggggaaactgaggcacggagcgggcctgtaggagctgtccaggccatctccaaccatgggagtgaggcacccgccctgctcccaccggctcctggccgtctgcgccctcgtgtccttggcaaccgctgcactcctggggcacatcctactccatgatttcctgctggttccccgagagctgagtggctcctccccagtcctggaggagactcacccagctcaccagcagggagccagcagaccagggccccgggatgcccaggcacaccccggccgtcccagagcagtgcccacacagtgcgacgtcccccccaacagccgcttcgattgcgcccctgacaaggccatcacccaggaacagtgcgaggcccgcggctgttgctacatccctgcaaagcaggggctgcagggagcccagatggggcagccctggtgcttcttcccacccagctaccccagctacaagctggagaacctgagctcctctgaaatgggctacacggccaccctgacccgtaccacccccaccttcttccccaaggacatcctgaccctgcggctggacgtgatgatggagactgagaaccgcctccacttcacgatcaaagatccagctaacaggcgctacgaggtgcccttggagaccccgcatgtccacagccgggcaccgtccccactctacagcgtggagttctccgaggagcccttcggggtgatcgtgcgccggcagctggacggccgcgtgctgctgaacacgacggtggcgcccctgttctttgcggaccagttccttcagctgtccacctcgctgccctcgcagtatatcacaggcctcgccgagcacctcagtcccctgatgctcagcaccagctggaccaggatcaccctgtggaaccgggaccttgcgcccacgcccggtgcgaacctctacgggtctcaccctttctacctggcgctggaggacggcgggtcggcacacggggtgttcctgctaaacagcaatgccatggatgtggtcctgcagccgagccctgcccttagctggaggtcgacaggtgggatcctggatgtctacatcttcctgggcccagagcccaagagcgtggtgcagcagtacctggacgttgtgggatacccgttcatgccgccatactggggcctgggcttccacctgtgccgctggggctactcctccaccgctatcacccgccaggtggtggagaacatgaccagggcccacttccccctggacgtccagtggaacgacctggactacatggactcccggagggacttcacgttcaacaaggatggcttccgggacttcccggccatggtgcaggagctgcaccagggcggccggcgctacatgatgatcgtggatcctgccatcagcagctcgggccctgccgggagctacaggccctacgacgagggtctgcggaggggggttttcatcaccaacgagaccggccagccgctgattgggaaggtatggcccgggtccactgccttccccgacttcaccaaccccacagccctggcctggtgggaggacatggtggctgagttccatgaccaggtgcccttcgacggcatgtggattgacatgaacgagccttccaacttcatcaggggctctgaggacggctgccccaacaatgagctggagaacccaccctacgtgcctggggtggttggggggaccctccaggcggccaccatctgtgcctccagccaccagtttctctccacacactacaacctgcacaacctctacggcctgaccgaagccatcgcctcccacagggcgctggtgaaggctcgggggacacgcccatttgtgatctcccgctcgacctttgctggccacggccgatacgccggccactggacgggggacgtgtggagctcctgggagcagctcgcctcctccgtgccagaaatcctgcagtttaacctgctgggggtgcctctggtcggggccgacgtctgcggcttcctgggcaacacctcagaggagctgtgtgtgcgctggacccagctgggggccttctaccccttcatgcggaaccacaacagcctgctcagtctgccccaggagccgtacagcttcagcgagccggcccagcaggccatgaggaaggccctcaccctgcgctacgcactcctcccccacctctacacactgttccaccaggcccacgtcgcgggggagaccgtggcccggcccctcttcctggagttccccaaggactctagcacctggactgtggaccaccagctcctgtggggggaggccctgctcatcaccccagtgctccaggccgggaaggccgaagtgactggctacttccccttgggcacatggtacgacctgcagacggtgccagtagaggcccttggcagcctcccacccccacctgcagctccccgtgagccagccatccacagcgaggggcagtgggtgacgctgccggcccccctggacaccatcaacgtccacctccgggctgggtacatcatccccctgcagggccctggcctcacaaccacagagtcccgccagcagcccatggccctggctgtggccctgaccaagggtggggaggcccgaggggagctgttctgggacgatggagagagcctggaagtgctggagcgaggggcctacacacaggtcatcttcctggccaggaataacacgatcgtgaatgagctggtacgtgtgaccagtgagggagctggcctgcagctgcagaaggtgactgtcctgggcgtggccacggcgccccagcaggtcctctccaacggtgtccctgtctccaacttcacctacagccccgacaccaaggtcctggacatctgtgtctcgctgttgatgggagagcagtttctcgtcagctggtgttagccgggcggagtgtgttagtctctccagagggaggctggttccccagggaagcagagcctgtgtgcgggcagcagctgtgtgcgggcctgggggttgcatgtgtcacctggagctgggcactaaccattccaagccgccgcatcgcttgtttccacctcctgggccggggctctggcccccaacgtgtctaggagagctttctccctagatcgcactgtgggccggggccctggagggctgctctgtgttaataagattgtaaggtttgccctcctcacctgttgccggcatgcgggtagtattagccacccccctccatctgttcccagcaccggagaagggggtgctcaggtggaggtgtggggtatgcacctgagctcctgcttcgcgcctgctgctctgccccaacgcgaccgctgcccggctgcccagagggctggatgcctgccggtccccgagcaagcctgggaactcaggaaaattcacaggacttgggagattctaaatcttaagtgcaattatttttaataaaaggggcatttggaatcag

SEQ ID NO: 172 - DNA, 2859 bp, Homo sapiens
  source 1..2859: mol_type = other DNA
atgggagtgaggcacccgccctgctcccaccggctcctggccgtctgcgccctcgtgtccttggcaaccgctgcactcctggggcacatcctactccatgatttcctgctggttccccgagagctgagtggctcctccccagtcctggaggagactcacccagctcaccagcagggagccagcagaccagggccccgggatgcccaggcacaccccggccgtcccagagcagtgcccacacagtgcgacgtcccccccaacagccgcttcgattgcgcccctgacaaggccatcacccaggaacagtgcgaggcccgcggctgttgctacatccctgcaaagcaggggctgcagggagcccagatggggcagccctggtgcttcttcccacccagctaccccagctacaagctggagaacctgagctcctctgaaatgggctacacggccaccctgacccgtaccacccccaccttcttccccaaggacatcctgaccctgcggctggacgtgatgatggagactgagaaccgcctccacttcacgatcaaagatccagctaacaggcgctacgaggtgcccttggagaccccgcatgtccacagccgggcaccgtccccactctacagcgtggagttctccgaggagcccttcggggtgatcgtgcgccggcagctggacggccgcgtgctgctgaacacgacggtggcgcccctgttctttgcggaccagttccttcagctgtccacctcgctgccctcgcagtatatcacaggcctcgccgagcacctcagtcccctgatgctcagcaccagctggaccaggatcaccctgtggaaccgggaccttgcgcccacgcccggtgcgaacctctacgggtctcaccctttctacctggcgctggaggacggcgggtcggcacacggggtgttcctgctaaacagcaatgccatggatgtggtcctgcagccgagccctgcccttagctggaggtcgacaggtgggatcctggatgtctacatcttcctgggcccagagcccaagagcgtggtgcagcagtacctggacgttgtgggatacccgttcatgccgccatactggggcctgggcttccacctgtgccgctggggctactcctccaccgctatcacccgccaggtggtggagaacatgaccagggcccacttccccctggacgtccagtggaacgacctggactacatggactcccggagggacttcacgttcaacaaggatggcttccgggacttcccggccatggtgcaggagctgcaccagggcggccggcgctacatgatgatcgtggatcctgccatcagcagctcgggccctgccgggagctacaggccctacgacgagggtctgcggaggggggttttcatcaccaacgagaccggccagccgctgattgggaaggtatggcccgggtccactgccttccccgacttcaccaaccccacagccctggcctggtgggaggacatggtggctgagttccatgaccaggtgcccttcgacggcatgtggattgacatgaacgagccttccaacttcatcaggggctctgaggacggctgccccaacaatgagctggagaacccaccctacgtgcctggggtggttggggggaccctccaggcggccaccatctgtgcctccagccaccagtttctctccacacactacaacctgcacaacctctacggcctgaccgaagccatcgcctcccacagggcgctggtgaaggctcgggggacacgcccatttgtgatctcccgctcgacctttgctggccacggccgatacgccggccactggacgggggacgtgtggagctcctgggagcagctcgcctcctccgtgccagaaatcctgcagtttaacctgctgggggtgcctctggtcggggccgacgtctgcggcttcctgggcaacacctcagaggagctgtgtgtgcgctggacccagctgggggccttctaccccttcatgcggaaccacaacagcctgctcagtctgccccaggagccgtacagcttcagcgagccggcccagcaggccatgaggaaggccctcaccctgcgctacgcactcctcccccacctctacacactgttccaccaggcccacgtcgcgggggagaccgtggcccggcccctcttcctggagttccccaaggactctagcacctggactgtggaccaccagctcctgtggggggaggccctgctcatcaccccagtgctccaggccgggaaggccgaagtgactggctacttccccttgggcacatggtacgacctgcagacggtgccagtagaggcccttggcagcctcccacccccacctgcagctccccgtgagccagccatccacagcgaggggcagtgggtgacgctgccggcccccctggacaccatcaacgtccacctccgggctgggtacatcatccccctgcagggccctggcctcacaaccacagagtcccgccagcagcccatggccctggctgtggccctgaccaagggtggggaggcccgaggggagctgttctgggacgatggagagagcctggaagtgctggagcgaggggcctacacacaggtcatcttcctggccaggaataacacgatcgtgaatgagctggtacgtgtgaccagtgagggagctggcctgcagctgcagaaggtgactgtcctgggcgtggccacggcgccccagcaggtcctctccaacggtgtccctgtctccaacttcacctacagccccgacaccaaggtcctggacatctgtgtctcgctgttgatgggagagcagtttctcgtcagctggtgttag

SEQ ID NO: 173 - protein, 883 aa, synthetic construct
  REGION 1..883: note = Synthetic
AHPGRPRAVPTQCDVPPNSRFDCAPDKAITQEQCEARGCCYIPAKQGLQGAQMGQPWCFFPPSYPSYKLENLSSSEMGYTATLTRTTPTFFPKDILTLRLDVMMETENRLHFTIKDPANRRYEVPLETPHVHSRAPSPLYSVEFSEEPFGVIVRRQLDGRVLLNTTVAPLFFADQFLQLSTSLPSQYITGLAEHLSPLMLSTSWTRITLWNRDLAPTPGANLYGSHPFYLALEDGGSAHGVFLLNSNAMDVVLQPSPALSWRSTGGILDVYIFLGPEPKSVVQQYLDVVGYPFMPPYWGLGFHLCRWGYSSTAITRQVVENMTRAHFPLDVQWNDLDYMDSRRDFTFNKDGFRDFPAMVQELHQGGRRYMMIVDPAISSSGPAGSYRPYDEGLRRGVFITNETGQPLIGKVWPGSTAFPDFTNPTALAWWEDMVAEFHDQVPFDGMWIDMNEPSNFIRGSEDGCPNNELENPPYVPGVVGGTLQAATICASSHQFLSTHYNLHNLYGLTEAIASHRALVKARGTRPFVISRSTFAGHGRYAGHWTGDVWSSWEQLASSVPEILQFNLLGVPLVGADVCGFLGNTSEELCVRWTQLGAFYPFMRNHNSLLSLPQEPYSFSEPAQQAMRKALTLRYALLPHLYTLFHQAHVAGETVARPLFLEFPKDSSTWTVDHQLLWGEALLITPVLQAGKAEVTGYFPLGTWYDLQTVPVEALGSLPPPPAAPREPAIHSEGQWVTLPAPLDTINVHLRAGYIIPLQGPGLTTTESRQQPMALAVALTKGGEARGELFWDDGESLEVLERGAYTQVIFLARNNTIVNELVRVTSEGAGLQLQKVTVLGVATAPQQVLSNGVPVSNFTYSPDTKVLDICVSLLMGEQFLVSWC

SEQ ID NO: 174 - DNA, 2649 bp, synthetic construct
  misc_feature 1..2649: note = Synthetic
  source 1..2649: mol_type = other DNA
gcacaccccggccgtcccagagcagtgcccacacagtgcgacgtcccccccaacagccgcttcgattgcgcccctgacaaggccatcacccaggaacagtgcgaggcccgcggctgttgctacatccctgcaaagcaggggctgcagggagcccagatggggcagccctggtgcttcttcccacccagctaccccagctacaagctggagaacctgagctcctctgaaatgggctacacggccaccctgacccgtaccacccccaccttcttccccaaggacatcctgaccctgcggctggacgtgatgatggagactgagaaccgcctccacttcacgatcaaagatccagctaacaggcgctacgaggtgcccttggagaccccgcatgtccacagccgggcaccgtccccactctacagcgtggagttctccgaggagcccttcggggtgatcgtgcgccggcagctggacggccgcgtgctgctgaacacgacggtggcgcccctgttctttgcggaccagttccttcagctgtccacctcgctgccctcgcagtatatcacaggcctcgccgagcacctcagtcccctgatgctcagcaccagctggaccaggatcaccctgtggaaccgggaccttgcgcccacgcccggtgcgaacctctacgggtctcaccctttctacctggcgctggaggacggcgggtcggcacacggggtgttcctgctaaacagcaatgccatggatgtggtcctgcagccgagccctgcccttagctggaggtcgacaggtgggatcctggatgtctacatcttcctgggcccagagcccaagagcgtggtgcagcagtacctggacgttgtgggatacccgttcatgccgccatactggggcctgggcttccacctgtgccgctggggctactcctccaccgctatcacccgccaggtggtggagaacatgaccagggcccacttccccctggacgtccagtggaacgacctggactacatggactcccggagggacttcacgttcaacaaggatggcttccgggacttcccggccatggtgcaggagctgcaccagggcggccggcgctacatgatgatcgtggatcctgccatcagcagctcgggccctgccgggagctacaggccctacgacgagggtctgcggaggggggttttcatcaccaacgagaccggccagccgctgattgggaaggtatggcccgggtccactgccttccccgacttcaccaaccccacagccctggcctggtgggaggacatggtggctgagttccatgaccaggtgcccttcgacggcatgtggattgacatgaacgagccttccaacttcatcaggggctctgaggacggctgccccaacaatgagctggagaacccaccctacgtgcctggggtggttggggggaccctccaggcggccaccatctgtgcctccagccaccagtttctctccacacactacaacctgcacaacctctacggcctgaccgaagccatcgcctcccacagggcgctggtgaaggctcgggggacacgcccatttgtgatctcccgctcgacctttgctggccacggccgatacgccggccactggacgggggacgtgtggagctcctgggagcagctcgcctcctccgtgccagaaatcctgcagtttaacctgctgggggtgcctctggtcggggccgacgtctgcggcttcctgggcaacacctcagaggagctgtgtgtgcgctggacccagctgggggccttctaccccttcatgcggaaccacaacagcctgctcagtctgccccaggagccgtacagcttcagcgagccggcccagcaggccatgaggaaggccctcaccctgcgctacgcactcctcccccacctctacacactgttccaccaggcccacgtcgcgggggagaccgtggcccggcccctcttcctggagttccccaaggactctagcacctggactgtggaccaccagctcctgtggggggaggccctgctcatcaccccagtgctccaggccgggaaggccgaagtgactggctacttccccttgggcacatggtacgacctgcagacggtgccagtagaggcccttggcagcctcccacccccacctgcagctccccgtgagccagccatccacagcgaggggcagtgggtgacgctgccggcccccctggacaccatcaacgtccacctccgggctgggtacatcatccccctgcagggccctggcctcacaaccacagagtcccgccagcagcccatggccctggctgtggccctgaccaagggtggggaggcccgaggggagctgttctgggacgatggagagagcctggaagtgctggagcgaggggcctacacacaggtcatcttcctggccaggaataacacgatcgtgaatgagctggtacgtgtgaccagtgagggagctggcctgcagctgcagaaggtgactgtcctgggcgtggccacggcgccccagcaggtcctctccaacggtgtccctgtctccaacttcacctacagccccgacaccaaggtcctggacatctgtgtctcgctgttgatgggagagcagtttctcgtcagctggtgt

SEQ ID NO: 175 - DNA, 2649 bp, synthetic construct
  misc_feature 1..2649: note = Synthetic
  source 1..2649: mol_type = other DNA
gcacacccaggcagacctagagcagtgcccacacaatgtgatgtcccccccaactcaagatttgattgtgcccctgacaaggccatcacccaagaacagtgtgaggccagaggctgttgctatatccctgcaaagcaggggttacagggagcccagatggggcagccatggtgcttcttcccacccagctacccttcttacaaactggaaaacctgagctcctctgaaatgggctacacagccacactgaccagaaccacccccaccttctttcccaaagatatcctgaccttaagactggatgtgatgatggaaactgaaaatagattacactttacaattaaagatccagctaacaggagatatgaagtgcccttggagaccccacatgttcattcaagagcacctagcccactctactctgtggagttctcagaagagccatttggggtgattgtgagaagacaattggatggaagagtgctgctgaatacaacagtggctccccttttttttgcagaccaatttcttcagctgtctaccagtctgcccagccagtatatcacaggcctggctgaacatctcagtcccttgatgctcagcaccagctggaccaggattaccttatggaatagagaccttgccccaactccaggtgccaacctctatgggtctcaccctttttacctggcccttgaggatggagggtctgcacatggggtgtttcttctaaacagcaatgcaatggatgtggtcctacagccatctcctgcccttagctggagatccacaggtgggatcctagatgtctatattttcctgggaccagagcctaagtcagtggtgcagcagtacctggatgttgtgggatatccattcatgcctccatactggggcctgggcttccatctgtgcagatggggatattcctccacagctatcacaagacaagtggtggagaatatgaccagggcccacttccccctggatgtccagtggaatgaccttgactacatggactccagaagggatttcacatttaacaaggatggcttcagagacttccctgccatggtgcaggaactgcaccaaggaggcagaagatacatgatgatagtggatcctgccatcagtagctctggccctgctgggagctatagaccctatgatgagggtctgagaaggggggttttcatcacaaatgagactggccaacctctgattgggaaggtatggccagggtccactgctttcccagacttcactaacccaacagccctggcctggtgggaggacatggtagctgaattccatgaccaggtgccttttgatggcatgtggattgacatgaatgaaccttccaacttcatcaggggctctgaggatggctgccccaacaatgagctggaaaacccaccttatgttcctggggtggttggtgggaccctccaggcagccaccatatgtgcctccagccaccagtttctctccacacactataacctccacaacctatatggactgacagaagccattgcctcccatagggcactggtgaaggctagaggtacaagaccatttgtgatatctagaagcacttttgctggccatggcagatatgcaggccactggactggagatgtttggagctcttgggagcagctggcctccagtgtgccagaaattctgcagtttaatctactaggggtgcctttggtaggggctgatgtctgtggctttctgggcaacacctcagaagagctttgtgtgagatggacccaactgggggccttctatcccttcatgagaaaccacaatagcctgctcagtttgccccaggagccatacagcttctcagagccagcccagcaggccatgaggaaggcccttactttaagatatgcactcctcccccacttgtacacactgtttcaccaggcccatgttgcaggagaaactgtggccagacccttgttcctggagttccctaaggactcttcaacctggactgtggaccaccaactcctctggggggaggccctcctcatcacaccagttctccaggcagggaaggctgaagttactggctacttccccttgggcacatggtatgaccttcagacagttccagtagaggcacttggcagcctcccacccccacctgcagctcccagagagccagcaattcactctgaagggcaatgggtgactctgccagccccactggacaccattaatgtccatttaagagctggttatatcatacccctgcagggccctggcctcacaaccacagagtccagacagcagcctatggctctggctgtagcattgactaaaggtggggaggcaagaggggagttattctgggatgatggagagtcactggaagtgttggagagaggggcatacacacaggttatcttcttggcaaggaataacacaatagtgaatgagttagtaagagtaaccagtgagggagctggcctgcagttacagaaggtgactgtccttggagtggccactgccccccagcaagtcctatccaatggtgtccctgtatccaacttcacctacagcccagacacaaaggtcctggatatctgtgtctccctgttgatgggagaacagtttctggtcagctggtgt

SEQ ID NO: 176 - DNA, 2649 bp, synthetic construct
  misc_feature 1..2649: note = Synthetic
  source 1..2649: mol_type = other DNA
gcccatcctggcagacctagagctgtgcccacacagtgtgatgtgcctccaaacagcagatttgactgtgcccctgacaaggccatcacacaagagcagtgtgaagccagaggctgctgttacatccctgccaagcaaggactgcaaggggctcagatgggacagccctggtgcttcttcccaccatcttaccccagctacaagctggaaaacctgagcagctctgagatgggctacactgctacactgaccagaaccacacctacattcttcccaaaggacatcctgacactgaggctggatgtgatgatggaaacagagaacaggctgcacttcaccatcaaggaccctgccaatagaagatatgaggtgcccctggaaacccctcatgtgcactctagagccccatctccactgtactctgtggaattttctgaggaaccctttggggtcatagtcagaaggcagctggatggcagagtgctgctgaacacaactgtggcccctctgttctttgctgatcagttcctgcagctgagcaccagcctgcctagccagtatatcacaggcctggcagagcacctgtctccactgatgctgagcacatcctggaccagaatcaccctgtggaacagagacctggctcccacacctggggccaacctgtatggctctcaccccttctatctggccctggaagatggtggttcagcccatggtgtctttctgctgaactccaatgccatggatgtggtgctgcagccctctcctgctctgtcttggagaagcactggtggcatcctggatgtgtacatctttctgggccctgagcctaagtctgtggtgcagcagtacctggatgttgtgggctaccccttcatgcctccttattggggcctgggcttccacctgtgcagatggggatacagcagcacagccatcaccagacaggttgtggaaaacatgaccagagcacacttcccactggatgtgcagtggaatgacctggactacatggacagcagaagggacttcaccttcaacaaggatggcttcagagacttccctgccatggtgcaagagctgcaccaaggtggtagaagatatatgatgattgtggacccagccatcagctcctctggaccagctggcagctacagaccctatgatgagggactgagaagaggggtgttcatcaccaatgagacaggccagcctctgattggcaaagtgtggccaggctccacagcctttccagatttcacaaaccccacagctctggcttggtgggaagatatggtggcagagttccatgatcaggtgccctttgatggcatgtggattgacatgaatgagcccagcaacttcatcaggggctctgaggatggatgccccaacaatgaactggaaaatcctccttatgtgcctggtgttgttggagggacactgcaggcagccacaatttgtgccagctctcaccagtttctgagcacccactacaacctgcacaatctgtatggcctgactgaggccattgccagccacagggctcttgtgaaggctagaggcaccagaccttttgtgatcagcaggtccacctttgctggccatggcagatatgctggccactggactggggatgtgtggtctagttgggagcagctggctagctctgtgcctgagatcctgcagttcaacctgctgggagtgccccttgttggagcagatgtgtgtggcttcctgggcaacacctcagaggaactgtgtgtcagatggactcagctgggagcattctaccctttcatgagaaaccacaacagcctgctgagcctgcctcaagagccttacagcttttctgagccagcacagcaggccatgagaaaggccctgactctgagatatgccctgctgcctcacctgtacaccctgttccatcaggctcatgtggctggggagactgtggctagacccctgttcctggaattccccaaggacagctccacctggacagtggatcatcagctgctgtggggagaagccctgctgattacacctgtgctgcaggctggcaaggctgaagtgacaggctacttccctcttggcacttggtatgacctgcagacagtgcctgtggaagctctgggatctctgcctccacctcctgctgctcctagagagcctgccattcactctgaaggccagtgggttaccctgcctgctccactggataccatcaatgtgcatctgagagcaggctacatcatccctctgcaaggccctggcctgaccaccacagaatctagacagcagccaatggcactggctgtggccctgaccaaaggtggagaagctagaggggagctgttctgggatgatggggagagcctggaagtgctggaaagaggggcctatacacaagtgatttttctggctaggaacaataccattgtgaatgagcttgtcagagtcacctctgaaggtgctggcctgcagctccagaaagtgacagtgcttggagtggccacagcaccccagcaagtgctgtctaatggggtgccagtgtccaacttcacatacagccctgataccaaggtcctggacatctgtgtgtccctgcttatgggagagcagttcctggtgtcttggtgc

SEQ ID NO: 177 - DNA, 2649 bp, synthetic construct
  misc_feature 1..2649: note = Synthetic
  source 1..2649: mol_type = other DNA
gcccaccctggcagacctagagcagtgcccacccagtgtgatgtgcctcctaacagcaggtttgactgtgcacctgacaaggccatcacccaggagcagtgtgaagccaggggttgctgctatatcccagccaaacagggtctgcagggagcccaaatgggccagccttggtgcttctttccaccctcttacccttcttacaagctggaaaacctatcttcaagtgagatgggctacacagccactctaacaagaaccacacctacctttttccccaaggacatcctcactctgagactggatgtaatgatggagactgaaaacagactccacttcaccattaaagacccagccaacagaagatatgaggtaccattggagaccccccatgtccacagcagagcacccagccccctatactcagtggaattctctgaggaaccttttggtgtcatagtgagaagacagctggatggcagagtgctcctcaacacaactgtggctccactgttttttgctgaccaattcctacagctgagcaccagcctgccctcccaatatatcacagggctggctgaacacctatcccctctgatgctgtccacctcctggaccaggatcactctgtggaacagggacttagcccctacccctggtgccaacctgtatggctctcacccattctacctggccctggaggatggaggttcagcccatggagtctttctcctgaactctaatgccatggatgtggtgctacagccatcccctgcattatcttggaggagcacaggaggaatcctggatgtatacatctttctgggcccagaaccaaagtcagttgtacagcagtaccttgatgtggtaggctaccccttcatgcctccatactggggtctgggcttccacctctgcagatggggctacagcagtacagctatcacaagacaggttgtggagaacatgacaagggctcacttccccctggatgtacagtggaatgacttggactacatggacagtagaagggacttcacattcaacaaggatggcttcagggacttccctgccatggtacaggaactccaccagggagggagaagatacatgatgattgtggacccagctatcagttctagtggtcctgcaggttcctacaggccctatgatgaaggcctcagaagaggagtgttcatcactaatgagacaggacagcctttgataggaaaggtctggcctggcagtacagctttcccagattttaccaatccaactgctttggcttggtgggaggacatggtggcagagttccatgaccaggtgccctttgatggcatgtggattgacatgaatgaaccatctaacttcatcagaggatcagaagatggatgccccaacaatgagctggagaaccctccttatgtgccaggtgtggtgggtggcaccctacaggctgcaaccatctgtgccagctcacaccagttcctgagtacacactacaatctacacaacctgtatggcctgactgaagctattgcctcacatagagcactagtcaaggccagagggaccaggccttttgttattagcagaagtacctttgctgggcatggcagatatgctgggcactggacaggtgatgtatggagcagctgggaacagttggcttcatctgttccagagatcctgcagttcaacctgttgggggtgcctttagtgggggcagatgtctgtggtttcttggggaacacctcagaggaactttgtgtcagatggacccaactgggggccttttacccctttatgagaaaccacaactctctgctcagcttgcctcaggaaccctattccttcagtgagcctgcccaacaggccatgaggaaggccctaaccctcagatatgcactgctgcctcacctgtacaccctttttcaccaggcccatgtggcaggtgagacagtagcaagacctctcttcttggagttccctaaagactcaagcacctggactgtggatcaccaactcctgtggggagaggctctgctgatcacacctgtactacaagctggtaaggctgaggtgacaggttacttccccctgggcacctggtatgatctgcagacagtccctgtagaggcactaggctctctgcctccccctcctgcagcccctagagagcctgctatccacagtgagggccaatgggtcaccctacctgctccactagacacaataaatgtgcacctgagagctggctatatcatccccctccagggaccaggtctgacaaccacagaatctagacaacagcccatggcactagcagttgccctgaccaagggaggtgaagccaggggtgagcttttctgggatgatggggagtccttggaggttctagaaagaggagcctacactcaggtcatcttcctggccagaaataacaccatagtgaatgagttggtgagagtgacctcagagggagctgggctccaactgcaaaaagtgacagtcttgggagtggccacagcaccacagcaggtcctcagcaatggggtgcctgtgagcaacttcacctactctccagacaccaaagtactggacatctgtgtgagcctgctgatgggtgagcaattcctggtgagctggtgc

SEQ ID NO: 178 - DNA, 2649 bp, synthetic construct
  misc_feature 1..2649: note = Synthetic
  source 1..2649: mol_type = other DNA
gcccaccctggcagacctagagcagtgcccacccagtgtgatgtgcctcctaacagcaggtttgactgtgcacctgacaaggccatcacccaggagcagtgtgaagccaggggttgctgctatatcccagccaaacagggtctgcagggagcccaaatgggccagccttggtgcttctttccaccctcttacccttcttacaagctggaaaacctatcttcaagtgagatgggctacacagccactctaacaagaaccacacctacctttttccccaaggacatcctcactctgagactggatgtaatgatggagactgaaaacagactccacttcaccattaaagacccagccaacagaagatatgaggtaccattggagaccccccatgtccacagcagagcacccagccccctatactcagtggaattctctgaggaaccttttggtgtcatagtgagaagacagctggatggcagagtgctcctcaacacaactgtggctccactgttttttgctgaccaattcctacagctgagcaccagcctgccctcccaatatatcacagggctggctgaacacctatcccctctgatgctgtccacctcctggaccaggatcactctgtggaacagggacttagcccctacccctggtgccaacctgtatggctctcacccattctacctggccctggaggatggaggttcagcccatggagtctttctcctgaactctaatgccatggatgtggtgctacagccatcccctgcattatcttggaggagcacaggaggaatcctggatgtatacatctttctgggcccagaaccaaagtcagttgtacagcagtaccttgatgtggtaggctaccccttcatgcctccatactggggtctgggcttccacctctgcagatggggctacagcagtacagctatcacaagacaggttgtggagaacatgacaagggctcacttccccctggatgtacagtggaatgacttggactacatggacagtagaagggacttcacattcaacaaggatggcttcagggacttccctgccatggtacaggaactccaccagggagggagaagatacatgatgattgtggacccagctatcagttctagtggtcctgcaggttcctacaggccctatgatgaaggcctcagaagaggagtgttcatcactaatgagacaggacagcctttgataggaaaggtctggcctggcagtacagctttcccagattttaccaatccaactgctttggcttggtgggaggacatggtggcagagttccatgaccaggtgccctttgatggcatgtggattgacatgaatgaaccatctaacttcatcagaggatcagaagatggatgccccaacaatgagctggagaaccctccttatgtgccaggtgtggtgggtggcaccctacaggctgcaaccatctgtgccagctcacaccagttcctgagtacacactacaatctacacaacctgtatggcctgactgaagctattgcctcacatagagcactagtcaaggccagagggaccaggccttttgttattagcagaagtacctttgctgggcatggcagatatgctgggcactggacaggtgatgtatggagcagctgggaacagttggcttcatctgttccagagatcctgcagttcaacctgttgggggtgcctttagtgggggcagatgtctgtggtttcttggggaacacctcagaggaactttgtgtcagatggacccaactgggggccttttacccctttatgagaaaccacaactctctgctcagcttgcctcaggaaccctattccttcagtgagcctgcccaacaggccatgaggaaggccctaaccctcagatatgcactgctgcctcacctgtacaccctttttcaccaggcccatgtggcaggtgagacagtagcaagacctctcttcttggagttccctaaagactcaagcacctggactgtggatcaccaactcctgtggggagaggctctgctgatcacacctgtactacaagctggtaaggctgaggtgacaggttacttccccctgggcacctggtatgatctgcagacagtccctgtagaggcactaggctctctgcctccccctcctgcagcccctagagagcctgctatccacagtgagggccaatgggtcaccctacctgctccactagacaccatcaatgtgcacctgagagctggctatatcatccccctccaaggaccaggtctgacaaccacagaatctagacaacagcccatggcactagcagttgccctgaccaagggaggtgaagccaggggtgagcttttctgggatgatggggagtccttggaggttctagaaagaggagcctacactcaggtcatcttcctggccagaaataacaccatagtgaatgagttggtgagagtgacctcagagggagctgggctccaactgcaaaaagtgacagtcttgggagtggccacagcaccacagcaggtcctcagcaatggggtgcctgtgagcaacttcacctactctccagacaccaaagtactggacatctgtgtgagcctgctgatgggtgagcaattcctggtgagctggtgc

SEQ ID NO: 179 - DNA, 2649 bp, synthetic construct
  misc_feature 1..2649: note = Synthetic
  source 1..2649: mol_type = other DNA
gcccaccctggcagacccagagcagtccccacccagtgtgatgtacctcccaacagcagatttgactgtgcccctgacaaggccatcacccaggaacagtgtgaggccagggggtgctgctatattcctgccaagcagggcctgcagggtgcccaaatgggccagccttggtgcttcttccctcccagctacccctcttacaagttagaaaacctgtctagctctgaaatgggctacacagccaccctgaccagaacaacccctactttcttcccaaaggacattttaaccctgaggctggatgtgatgatggagactgagaatagactgcacttcaccatcaaggacccagccaacagaaggtatgaagtgcctctggagaccccccatgtgcactctagggcacctagccctctatactcagtggagttctctgaagaaccttttggggtcatagtgaggaggcaactggatggcagagtgcttctgaacaccacagtggcccccctgttctttgctgaccaattcctgcagctgagtaccagcctgccttcacagtacatcacaggcctggctgaacacctgagccctctgatgttgagcaccagctggaccagaatcaccttatggaacagagacttagccccaacccctggagccaacctctatggaagccaccctttctacctggccctggaggatggaggctctgcccatggtgttttcctcctgaactccaatgccatggatgttgtgctgcaaccttcccctgctctgagctggagatcaacagggggtatcttagatgtgtacatcttcctgggccctgaaccaaagtctgtggtacagcagtacctggatgtagtgggctaccccttcatgcccccctactggggcctaggcttccacctgtgcaggtgggggtactctagcactgccatcaccagacaggtggtggagaacatgactagagcccactttccattggatgtgcaatggaatgaccttgactacatggactcaaggagggacttcacattcaacaaggatggcttcagagactttcctgccatggtgcaggagctgcaccaagggggcagaagatacatgatgattgtggacccagccatctcctcttcaggacctgctggttcttatagaccttatgatgagggccttagaagaggtgtgttcattaccaatgaaactggacagcctctgattggcaaggtgtggccaggctccactgccttccctgactttacaaaccctacagccctggcctggtgggaggatatggtagctgagttccatgaccaggtgccttttgatggcatgtggatagacatgaatgaaccaagtaacttcatcagaggtagtgaggatggctgtcccaacaatgagctggagaaccccccatatgttcctggagtggtgggtggtactctccaggctgctaccatttgtgcctcaagtcaccagttcctgagcacccactacaacctgcacaacctgtatggcctgactgaggctattgctagccacagggctctggtgaaggccaggggaacaagaccttttgtgatttctaggtcaacatttgcaggccatggaagatatgctggtcactggacaggtgatgtgtggtcttcctgggaacagctggccagttcagtgccagagatcctgcagttcaacctcctaggagtgccactggtgggggcagatgtttgtggctttctggggaacacctctgaagagctgtgtgtgagatggacccagctgggagccttctacccattcatgaggaaccacaacagtttgctttccctacctcaggagccctacagcttctctgagccagcccaacaggccatgagaaaggccttgacacttagatatgccctactgccccacttgtataccttattccaccaggctcatgtggctggtgagactgtggccaggcccctgttcctggagttccccaaggacagctccacctggacagtagaccatcagctcctgtggggagaggccctgcttatcacccctgtgctccaagctggcaaagcagaggtgacaggttacttccctctgggcacctggtatgatctccagacagtgcctgtggaagcattaggttctttgcctcctccacctgcagcccccagagagcctgccatccactctgaaggccagtgggtcaccctgcctgcccccctggacacaatcaatgtccacctgagagctggttacataatccctctgcaagggcctggcttgaccaccacagaaagcagacagcagcctatggccctggctgtagctctgactaagggaggtgaggcaagaggggagctgttctgggatgatggagagagcctggaagtgctagagagaggagcctacacccaagtcatcttcttggccaggaacaataccatagtgaatgagctggtgagggtgacctctgaaggggctggccttcaactccagaaggtgactgttctgggagtggccacagccccacagcaggtgctgtccaatggtgtgcctgtcagcaacttcacatacagcccagatactaaggtgctggatatctgtgttagccttctcatgggtgaacagttcttagtgtcatggtgc

SEQ ID NO: 180 - DNA, 2649 bp, synthetic construct
  misc_feature 1..2649: note = Synthetic
  source 1..2649: mol_type = other DNA
gcccaccctggcagacctagagctgtgcctacccagtgtgatgtgccacctaactccagatttgactgtgcccctgacaaggccatcacccaagagcagtgcgaggccaggggatgctgctacatccctgccaaacagggcctgcagggagcccagatgggccaaccctggtgctttttccctccctcttacccctcctacaagctggagaacctgagctcctcagagatgggctacacagctaccctgaccagaaccacccccaccttctttcctaaggacatcctgaccctgagactggatgtgatgatggaaacagagaaccggctgcacttcacaatcaaggacccagccaacagaagatatgaagttcccctggagacccctcatgtgcactccagggcccccagccccctatacagcgtggagttctctgaggagccttttggcgtcattgtgagaagacaactggatggcagagtgctgttgaacaccacagtggcccctctcttctttgctgaccaattcctgcagctgagcaccagtctgcccagccagtacatcactggcctggctgagcacctgtctcccttaatgctgtccaccagctggacaaggatcaccctgtggaaccgggacttggcccccacgcctggagccaacctatacggctcccaccccttctacctggccctggaggacggaggctcagcccatggagttttcctgctgaactctaacgccatggatgtggtgctgcaacctagccctgccctgagctggagaagcactggcggaattctcgatgtctacatcttcctgggacctgaaccaaagtcagtggtgcagcagtacctggatgtggtgggctaccccttcatgccaccttactggggcctgggatttcacctgtgcagatggggctactccagcacagccatcaccagacaggtggtggagaacatgacccgggcccacttccccctggatgtccagtggaatgacttagactacatggatagcagaagagacttcaccttcaacaaggatggctttagagacttccctgccatggtgcaggaactgcaccagggtggcagaagatacatgatgattgtggaccctgccatttctagctctggcccagcaggctcctacaggccctatgatgagggactgcggagaggggtcttcatcaccaatgagacaggccagccactgatcggcaaggtgtggcctggatccacagccttcccagacttcaccaaccctacagcccttgcctggtgggaagacatggtggccgaattccacgaccaggtgccctttgatggcatgtggatcgacatgaatgagcctagcaatttcatcagaggaagtgaggatggctgccccaacaatgaattagaaaacccgccctatgtgcctggcgttgtgggaggcaccctccaggctgccaccatctgtgccagcagccaccagttcttatccacacactacaacctgcacaacctgtatggcctgaccgaagccattgccagccacagagcgctggtgaaagccaggggcacccggccttttgtgatcagcagaagcaccttcgctggccatggcaggtatgccggacattggacaggagatgtatggagctcttgggagcagttggccagctctgtgcctgagatcctgcagttcaacctactgggggtccctctggtgggagcagatgtctgcggcttcctaggcaacacctcagaggaactgtgcgtaagatggacccagctgggggccttctaccctttcatgaggaaccacaactctctgctgagcctgcctcaggagccatacagcttctctgagccagcccagcaggccatgagaaaggccctgaccctgagatatgccttactgccccacctgtacacactgttccaccaggcccatgtggctggggagacagtggcacggcccctgttcttggagttccccaaggactccagcacctggacagtggaccaccagctgctctggggagaggccctgctcatcaccccagtgctgcaggctggcaaggctgaagtcacaggctacttccccctgggcacctggtatgacctccaaactgtgccagtggaggccctgggcagcctgcctcctccccctgctgctcctagagagcctgccatccactcggagggccagtgggtgacactgcctgcccccctagacaccatcaatgttcacctgagagcaggctacatcatcccactgcaaggccctggcctgaccaccactgagagcagacagcagcccatggccctggcagttgccctgaccaagggcggcgaagccagaggagaactgttctgggatgatggcgaatctttggaagtgctggagagaggggcctacacccaggtgatcttcctggcccggaacaacactatagtgaatgaactggtgcgggtgacatcagagggtgcaggcctgcagctgcaaaaagtgacagtgctgggtgtggcaacagcccctcagcaggtactatccaatggagtgccagtgagcaacttcacctacagcccagacactaaggtgctagacatctgtgtttctctgctgatgggagagcaattcctggtgagctggtgc

SEQ ID NO: 181 - DNA, 2649 bp, synthetic construct
  misc_feature 1..2649: note = Synthetic
  source 1..2649: mol_type = other DNA
gcccaccctggcagacctagagctgtgcctacccagtgtgatgtgccacctaactccagatttgactgtgcccctgacaaggccatcacccaagagcagtgcgaggccaggggatgctgctacatccctgccaaacagggcctgcagggagcccagatgggccaaccctggtgctttttccctccctcttacccctcctacaagctggagaacctgagctcctcagagatgggctacacagctaccctgaccagaaccacccccaccttctttcctaaggacatcctgaccctgagactggatgtgatgatggaaacagagaaccggctgcacttcacaatcaaggacccagccaacagaagatatgaagttcccctggagacccctcatgtgcactccagggcccccagccccctatacagcgtggagttctctgaggagccttttggcgtcattgtgagaagacaactggatggcagagtgctgttgaacaccacagtggcccctctcttctttgctgaccaattcctgcagctgagcaccagtctgcccagccagtacatcactggcctggctgagcacctgtctcccttaatgctgtccaccagctggacaaggatcaccctgtggaaccgggacttggcccccacgcctggagccaacctatacggctcccaccccttctacctggccctggaggacggaggctcagcccatggagttttcctgctgaactctaacgccatggatgtggtgctgcaacctagccctgccctgagctggagaagcactggcggaattctcgatgtctacatcttcctgggacctgaaccaaagtcagtggtgcagcagtacctggatgtggtgggctaccccttcatgccaccttactggggcctgggatttcacctgtgcagatggggctactccagcacagccatcaccagacaggtggtggagaacatgacccgggcccacttccccctggatgtccagtggaatgacttagactacatggatagcagaagagacttcaccttcaacaaggatggctttagagacttccctgccatggtgcaggaactgcaccagggtggcagaagatacatgatgatcgttgaccctgccatttctagctctggcccagcaggctcctacaggccctatgatgagggactgcggagaggggtcttcatcaccaatgagacaggccagccactgatcggcaaggtgtggcctggatccacagccttcccagacttcaccaaccctacagcccttgcctggtgggaagacatggtggccgaattccacgaccaggtgccctttgatggcatgtggatcgacatgaatgagcctagcaatttcatcagaggaagtgaggatggctgccccaacaatgaattagaaaacccgccctatgtgcctggcgttgtgggaggcaccctccaggctgccaccatctgtgccagcagccaccagttcttatccacacactacaacctgcacaacctgtatggcctgaccgaagccattgccagccacagagcgctggtgaaagccaggggcacccggccttttgtgatcagcagaagcaccttcgctggccatggcaggtatgccggacattggacaggagacgtctggagctcttgggagcagttggccagctctgtgcctgagatcctgcagttcaacctactgggggtccctctggtgggagcagatgtctgcggcttcctaggcaacacctcagaggaactgtgcgtaagatggacccagctgggggccttctaccctttcatgaggaaccacaactctctgctgagcctgcctcaggagccatacagcttctctgagccagcccagcaggccatgagaaaggccctgaccctgagatatgccttactgccccacctgtacacactgttccaccaggcccacgtcgctggggagacagtggcacggcccctgttcttggagttccccaaggactccagcacctggacagtggaccaccagctgctctggggagaggccctgctcatcaccccagtgctgcaggctggcaaggctgaagtcacaggctacttccccctgggcacctggtatgacctccaaactgtgccagtggaggccctgggcagcctgcctcctccccctgctgctcctagagagcctgccatccactcggagggccagtgggtgacactgcctgcccccctagacaccatcaatgttcacctgagagcaggctacatcatcccactgcaaggccctggcctgaccaccactgagagcagacagcagcccatggccctggccgttgccctgaccaagggcggcgaagccagaggagaactgttctgggatgatggcgaatctttggaagtgctggagagaggggcctacacccaggtgatcttcctggcccggaacaacactatcgttaatgaactggtgcgggtgacatcagagggtgcaggcctgcagctgcaaaaagtgacagtgctgggtgtggcaacagcccctcagcaggtactatccaatggagtgccagtgagcaacttcacctacagcccagacactaaggtgctagacatctgtgtttctctgctgatgggagagcaattcctggtgagctggtgc

SEQ ID NO: 182 - DNA, 2649 bp, synthetic construct
  misc_feature 1..2649: note = Synthetic
  source 1..2649: mol_type = other DNA
gctcatcctggaagacctagagctgtgcctacacagtgtgatgtgcctcctaattctagatttgattgtgctcctgataaggctatcacacaggaacagtgtgaagctagaggatgttgttatatccctgctaagcagggactgcagggagctcagatgggacagccttggtgtttttttcctccttcttatccttcttataagctggaaaatctgtcttcttctgaaatgggatatacagctacactgacaagaacaacacctacattttttcctaaggatatcctgacactgagactggatgtgatgatggaaacagaaaatagactgcattttacaatcaaggatcctgctaatagaagatatgaagtgcctctggaaacacctcatgtgcattctagagctccttctcctctgtattctgtggaattttctgaagaaccttttggagtgatcgtgagaagacagctggatggaagagtgctgctgaatacaacagtggctcctctgttttttgctgatcagtttctgcagctgtctacatctctgccttctcagtatatcacaggactggctgaacatctgtctcctctgatgctgtctacatcttggacaagaatcacactgtggaatagagatctggctcctacacctggagctaatctgtatggatctcatcctttttatctggctctggaagatggaggatctgctcatggagtgtttctgctgaattctaatgctatggatgtggtgctgcagccttctcctgctctgtcttggagatctacaggaggaatcctggatgtgtatatctttctgggacctgaacctaagtctgtggtgcagcagtatctggatgtggtgggatatccttttatgcctccttattggggactgggatttcatctgtgtagatggggatattcttctacagctatcacaagacaggtggtggaaaatatgacaagagctcattttcctctggatgtgcagtggaatgatctggattatatggattctagaagagattttacatttaataaggatggatttagagattttcctgctatggtgcaggaactgcatcagggaggaagaagatatatgatgatcgtggatcctgctatctcttcttctggacctgctggatcttatagaccttatgatgaaggactgagaagaggagtgtttatcacaaatgaaacaggacagcctctgatcggaaaggtgtggcctggatctacagcttttcctgattttacaaatcctacagctctggcttggtgggaagatatggtggctgaatttcatgatcaggtgccttttgatggaatgtggatcgatatgaatgaaccttctaattttatcagaggatctgaagatggatgtcctaataatgaactggaaaatcctccttatgtgcctggagtggtgggaggaacactgcaggctgctacaatctgtgcttcttctcatcagtttctgtctacacattataatctgcataatctgtatggactgacagaagctatcgcttctcatagagctctggtgaaggctagaggaacaagaccttttgtgatctctagatctacatttgctggacatggaagatatgctggacattggacaggagatgtgtggtcttcttgggaacagctggcttcttctgtgcctgaaatcctgcagtttaatctgctgggagtgcctctggtgggagctgatgtgtgtggatttctgggaaatacatctgaagaactgtgtgtgagatggacacagctgggagctttttatccttttatgagaaatcataattctctgctgtctctgcctcaggaaccttattctttttctgaacctgctcagcaggctatgagaaaggctctgacactgagatatgctctgctgcctcatctgtatacactgtttcatcaggctcatgtggctggagaaacagtggctagacctctgtttctggaatttcctaaggattcttctacatggacagtggatcatcagctgctgtggggagaagctctgctgatcacacctgtgctgcaggctggaaaggctgaagtgacaggatattttcctctgggaacatggtatgatctgcagacagtgcctgtggaagctctgggatctctgcctcctcctcctgctgctcctagagaacctgctatccattctgaaggacagtgggtgacactgcctgctcctctggatacaatcaatgtgcatctgagagctggatatatcatccctctgcagggacctggactgacaacaacagaatctagacagcagcctatggctctggctgtggctctgacaaagggaggagaagctagaggagaactgttttgggatgatggagaatctctggaagtgctggaaagaggagcttatacacaggtgatctttctggctagaaataatacaatcgtgaatgaactggtgagagtgacatctgaaggagctggactgcagctgcagaaggtgacagtgctgggagtggctacagctcctcagcaggtgctgtctaatggagtgcctgtgtctaattttacatattctcctgatacaaaggtgctggatatctgtgtgtctctgctgatgggagaacagtttctggtgtcttggtgt

SEQ ID NO: 183 - protein, 240 aa, synthetic construct
  REGION 1..240: note = Synthetic
QVQLQESGPKVVKPSETLSLTCTVSGGSISSYYWNWIRQSPGKGLEWIGYTKRGYTDYNPSLRSRVTISEDTSKNQFSLRISSVTAADTAVYYCAQMGWGSHAFDMWGQGTMVAVSSGGSGGGGSGGGGSGGEIVLTQSPGTLSLSPGERATLSCRASQSVSSSYLAWYQQKPGQAPRLLIYGASSRATGIPDRFSGSGSGTDFTLTISRLEPEDFAVYYCQQYGSSPWTFGQGTKVEIK

SEQ ID NO: 184 - DNA, 720 bp, synthetic construct
  misc_feature 1..720: note = Synthetic
  source 1..720: mol_type = other DNA
caggtgcaactacaggagtcgggcccaaaggtggtgaagccttcggagaccctgtccctcacctgcactgtctctggtggctccatcagtagttactactggaattggatccgccagtccccagggaagggactggagtggattggatataccaaaagagggtataccgactacaacccctccctcaggagtcgcgtcactatatcagaagacacgtccaagaaccagttctccctgaggatcagctctgtgaccgccgcagacacggccgtatattactgtgcacaaatggggtggggatcccatgcttttgacatgtggggccaagggacaatggtcgccgtctcttcaggaggaagtggtggaggcgggtcaggaggtggcgggagcggcggtgaaatagttttgacacagagtcccggcacactgtcactctctcccggggaaagagccaccttgtcatgtagagcaagtcagtcagtctctagctcttatctcgcctggtaccagcagaagccgggacaggcccctagactgctgatctacggggcaagttccagggccaccggaatccccgaccggttcagtggaagcggaagcggaaccgattttactttgacgatttctagactggagccagaggatttcgccgtttactattgtcaacagtacggaagcagcccgtggacgtttggccagggcacgaaggtagaaatcaag

SEQ ID NO: 185 - DNA, 720 bp, synthetic construct
  misc_feature 1..720: note = Synthetic
  source 1..720: mol_type = other DNA
caggtgcaactacaggagtctggcccaaaagtggtgaaaccttctgagacccttagtctcacctgcactgtctctggtggctccataagtagttattattggaattggatcagacagtccccagggaagggactggagtggattggatataccaaaagaggctatacagattacaatccctccctcaggagtagagtcactatatcagaagacacatccaaaaatcagttcagtctgaggatcagctctgtgacagctgcagacacagcagtatattactgtgcacaaatgggttggggatcccatgcttttgatatgtggggccaagggacaatggttgcagtatcttcaggaggaagtggtggaggagggtcaggaggtggaggatctggtggtgaaatagttttgacacagagtccaggcacactgtcactctctccaggggaaagagccaccttgtcatgtagagcaagtcagtcagtctctagctcttatctggcctggtaccagcagaagccaggacaggctcctagactcctgatttatggggcaagttccagggctacaggaatcccagatagatttagtggatctggatctggaactgattttactttgacaatttctagactggagccagaggattttgctgtttattattgtcaacagtatggatctagcccatggacatttggacagggcactaaagtagaaataaag

SEQ ID NO: 186 - DNA, 720 bp, synthetic construct
  misc_feature 1..720: note = Synthetic
  source 1..720: mol_type = other DNA
caggtccagctgcaagagtctggccccaaggtggtcaagccctctgagacactgagcctgacctgcacagtgtctggtggcagcatcagcagctactactggaactggatcagacagagccctggcaaaggcctggaatggattggctacaccaagagaggctacacagactacaaccccagcctgagaagcagagtgaccatctctgaggacaccagcaagaaccagttcagcctgaggatcagctctgtgacagctgctgacacagcagtgtactactgtgcccagatgggctggggcagccatgcctttgatatgtggggccagggcacaatggtggctgtgtccagtgggggctcaggaggaggtggctcaggaggtggaggttcaggaggggagattgtgctgacccagtctcctggcacactgtctctgagccctggggaaagagccacactgagctgtagagccagccagtctgtgtcctctagctacctggcctggtatcagcagaagcctggacaggctcccagactgctgatctatggggcctcttctagagccacaggcatccctgacagattcagtggcagtggctctggcacagacttcaccctgaccatcagcagactggaacctgaggactttgctgtgtactattgccagcagtatggcagcagcccctggacatttggacagggcaccaaggtggaaatcaaa

SEQ ID NO: 187 - DNA, 720 bp, synthetic construct
  misc_feature 1..720: note = Synthetic
  source 1..720: mol_type = other DNA
caagtgcagctgcaggagtctggccctaaggtggtgaaaccatctgagacattgtccctgacttgcactgtatcaggagggtccattagtagttactactggaattggatcagacagagcccagggaagggactagagtggattggctacactaagagagggtacactgactacaaccccagcctcaggtctagagtgactatctctgaggacacctctaagaatcagttctccctgagaataagttctgtgacagcagctgacacagctgtgtactactgtgcccagatgggctggggcagtcatgcctttgacatgtggggccagggaacaatggtagctgtgagctctggaggatcaggggggggaggctctgggggggggggcagtgggggagagattgtcctaacccagtctcctggcaccctttccctttcccctggagagagagccactcttagctgcagagccagccagtctgtctccagctcttacctagcatggtaccaacaaaaacctggacaggctcctagacttcttatctatggagctagtagcagggccacaggcatcccagacaggttttcaggttctggctctggcacagacttcaccctgaccatatccagactggagccagaagattttgcagtctactactgccaacagtatggaagcagcccttggacatttggacaaggcaccaaggttgaaatcaaa

SEQ ID NO: 188 - DNA, 720 bp, synthetic construct
  misc_feature 1..720: note = Synthetic
  source 1..720: mol_type = other DNA
caagtgcagctgcaggagtctggccctaaggtggtgaaaccatctgagacattgtccctgacttgcactgtatcaggagggtccattagtagttactactggaattggatcagacagagcccagggaagggactagagtggattggctacactaagagagggtacactgactacaaccccagcctcaggtctagagtgactatctctgaggacacctctaagaatcagttctccctgagaataagttctgtgacagcagctgacacagctgtgtactactgtgcccagatgggctggggcagtcatgcctttgacatgtggggccagggaacaatggtagctgtgagctctggaggatcaggggggggaggctctggaggaggtggcagtgggggagagattgtcctaacccagtctcctggcaccctttccctttcccctggagagagagccactcttagctgcagagccagccagtctgtctccagctcttacctagcatggtaccaacaaaaacctggacaggctcctagacttcttatctatggagctagtagcagggccacaggcatcccagacaggttttcaggttctggctctggcacagacttcaccctgaccatatccagactggagccagaagattttgcagtctactactgccaacagtatggaagcagcccttggacatttggacaaggcaccaaggttgaaatcaaa

SEQ ID NO: 189 - DNA, 720 bp, synthetic construct
  misc_feature 1..720: note = Synthetic
  source 1..720: mol_type = other DNA
caggtacagctgcaggagtctgggcccaaagtagtgaaaccctctgaaaccctatcactgacctgcacagtttcaggtggaagcattagcagttactactggaactggatcagacagagtccaggcaagggtctggaatggataggctacaccaagagaggttacactgactacaacccatcccttcggtccagagtgaccatttcagaggacacatctaaaaaccagttctccctgagaatcagttctgtgactgctgctgacacagctgtgtactactgtgctcagatgggctggggctcccatgcctttgacatgtggggccagggcaccatggttgcagtgagctctggtggctctggaggaggtggatctggagggggaggctcaggaggtgagattgtgctgacccaaagtcctggcacattgagcctgagccctggagaaagggccactctctcttgcagggccagccagtctgtgtccagttcctacctggcttggtaccaacagaagcctggccaggcccctaggttgctgatctatggagccagctccagagccacagggatccctgacagattctcaggctctggctctggcacagacttcaccctgaccatcagcagactagagcctgaagactttgctgtgtactactgccagcagtatggaagcagcccttggacttttgggcagggcacaaaggttgagatcaaa

SEQ ID NO: 190 - DNA, 720 bp, synthetic construct
  misc_feature 1..720: note = Synthetic
  source 1..720: mol_type = other DNA
caggtgcagctgcaggagtctggccctaaggttgtgaaaccttctgagaccctgagcctgacttgcacagtgtcagggggctctatcagctcatactactggaactggatcagacaaagccctggcaagggcctggaatggattggctacactaagagaggctacacagactacaaccctagcctcaggagccgagtgaccatctcagaggacacatccaagaaccaattctcactgcggattagctctgtgacagctgctgacacagctgtgtactactgtgcccagatgggctggggcagccatgcctttgacatgtggggccagggcaccatggtggctgtgagctctgggggctcaggaggaggtggctcaggcggtggcggctccgggggggaaattgtcctcacccagagccctggcaccctgagcctgagccctggcgaaagagccacactgagctgcagggccagccagtcagtgtccagcagctacctggcttggtaccagcagaagcctggccaggcgccccggctgctgatttatggtgcctcatcccgggccacaggaatccctgacagatttagtggcagtggcagcgggactgactttacactgaccatcagcagactggaacctgaggattttgcagtgtactactgccagcagtatggcagcagcccttggacctttggccagggcaccaaggtggaaatcaag

SEQ ID NO: 191 - DNA, 720 bp, synthetic construct
  misc_feature 1..720: note = Synthetic
  source 1..720: mol_type = other DNA
caggtgcagctgcaggagtctggccctaaggttgtgaaaccttctgagaccctgagcctgacttgcacagtgtcagggggctctatcagctcatactactggaactggatcagacaaagccctggcaagggcctggaatggattggctacactaagagaggctacacagactacaaccctagcctcaggagccgagtgaccatctcagaggacacatccaagaaccaattctcactgcggattagctctgtgacagctgctgacacagctgtgtactactgtgcccagatgggctggggcagccatgcctttgacatgtggggccagggcaccatggtggctgtgagctctgggggctcaggaggaggtggctcaggcggtggcggctccgggggggaaatcgtgctcacccagagccctggcaccctgagcctgagccctggcgaaagagccacactgagctgcagggccagccagtcagtgtccagcagctacctggcttggtaccagcagaagcctggccaggcgccccggctgctgatttatggtgcctcatcccgggccacaggaatccctgacagatttagtggcagtggcagcgggactgactttacactgaccatcagcagactggaacctgaggattttgcagtgtactactgccagcagtatggcagcagcccttggacctttggccagggcaccaaggtggaaatcaag

SEQ ID NO: 192 - DNA, 720 bp, synthetic construct
  misc_feature 1..720: note = Synthetic
  source 1..720: mol_type = other DNA
caggtgcagctgcaggaatctggacctaaggtggtgaagccttctgaaacactgtctctgacatgtacagtgtctggaggatctatctcttcttattattggaattggatcagacagtctcctggaaagggactggaatggatcggatatacaaagagaggatatacagattataatccttctctgagatctagagtgacaatctctgaagatacatctaagaatcagttttctctgagaatctcttctgtgacagctgctgatacagctgtgtattattgtgctcagatgggatggggatctcatgcttttgatatgtggggacagggaacaatggtggctgtgtcttctggaggatctggaggaggaggatctggaggaggaggatctggaggagaaatcgtgctgacacagtctcctggaacactgtctctgtctcctggagaaagagctacactgtcttgtagagcttctcagtctgtgtcttcttcttatctggcttggtatcagcagaagcctggacaggctcctagactgctgatctatggagcttcttctagagctacaggaatccctgatagattttctggatctggatctggaacagattttacactgacaatctctagactggaacctgaagattttgctgtgtattattgtcagcagtatggatcttctccttggacatttggacagggaacaaaggtggaaatcaag

SEQ ID NO: 193 - protein, 1128 aa, synthetic construct
  REGION 1..1128: note = Synthetic
  REGION 1..240: note = MISC_FEATURE - 12450 anti-CD63 scFv
  REGION 241..245: note = MISC_FEATURE - G4S linker
  REGION 246..1128: note = MISC_FEATURE - GAA (70-952)
QVQLQESGPKVVKPSETLSLTCTVSGGSISSYYWNWIRQSPGKGLEWIGYTKRGYTDYNPSLRSRVTISEDTSKNQFSLRISSVTAADTAVYYCAQMGWGSHAFDMWGQGTMVAVSSGGSGGGGSGGGGSGGEIVLTQSPGTLSLSPGERATLSCRASQSVSSSYLAWYQQKPGQAPRLLIYGASSRATGIPDRFSGSGSGTDFTLTISRLEPEDFAVYYCQQYGSSPWTFGQGTKVEIKGGGGSAHPGRPRAVPTQCDVPPNSRFDCAPDKAITQEQCEARGCCYIPAKQGLQGAQMGQPWCFFPPSYPSYKLENLSSSEMGYTATLTRTTPTFFPKDILTLRLDVMMETENRLHFTIKDPANRRYEVPLETPHVHSRAPSPLYSVEFSEEPFGVIVRRQLDGRVLLNTTVAPLFFADQFLQLSTSLPSQYITGLAEHLSPLMLSTSWTRITLWNRDLAPTPGANLYGSHPFYLALEDGGSAHGVFLLNSNAMDVVLQPSPALSWRSTGGILDVYIFLGPEPKSVVQQYLDVVGYPFMPPYWGLGFHLCRWGYSSTAITRQVVENMTRAHFPLDVQWNDLDYMDSRRDFTFNKDGFRDFPAMVQELHQGGRRYMMIVDPAISSSGPAGSYRPYDEGLRRGVFITNETGQPLIGKVWPGSTAFPDFTNPTALAWWEDMVAEFHDQVPFDGMWIDMNEPSNFIRGSEDGCPNNELENPPYVPGVVGGTLQAATICASSHQFLSTHYNLHNLYGLTEAIASHRALVKARGTRPFVISRSTFAGHGRYAGHWTGDVWSSWEQLASSVPEILQFNLLGVPLVGADVCGFLGNTSEELCVRWTQLGAFYPFMRNHNSLLSLPQEPYSFSEPAQQAMRKALTLRYALLPHLYTLFHQAHVAGETVARPLFLEFPKDSSTWTVDHQLLWGEALLITPVLQAGKAEVTGYFPLGTWYDLQTVPVEALGSLPPPPAAPREPAIHSEGQWVTLPAPLDTINVHLRAGYIIPLQGPGLTTTESRQQPMALAVALTKGGEARGELFWDDGESLEVLERGAYTQVIFLARNNTIVNELVRVTSEGAGLQLQKVTVLGVATAPQQVLSNGVPVSNFTYSPDTKVLDICVSLLMGEQFLVSWC

SEQ ID NO: 194 - DNA, 3384 bp, synthetic construct
  misc_feature 1..3384: note = Synthetic
  misc_feature 1..720: note = 12450 anti-CD63 scFv
  misc_feature 721..735: note = G4S linker
  misc_feature 736..3384: note = GAA (70-952)
  source 1..3384: mol_type = other DNA
caggtgcaactacaggagtcgggcccaaaggtggtgaagccttcggagaccctgtccctcacctgcactgtctctggtggctccatcagtagttactactggaattggatccgccagtccccagggaagggactggagtggattggatataccaaaagagggtataccgactacaacccctccctcaggagtcgcgtcactatatcagaagacacgtccaagaaccagttctccctgaggatcagctctgtgaccgccgcagacacggccgtatattactgtgcacaaatggggtggggatcccatgcttttgacatgtggggccaagggacaatggtcgccgtctcttcaggaggaagtggtggaggcgggtcaggaggtggcgggagcggcggtgaaatagttttgacacagagtcccggcacactgtcactctctcccggggaaagagccaccttgtcatgtagagcaagtcagtcagtctctagctcttatctcgcctggtaccagcagaagccgggacaggcccctagactgctgatctacggggcaagttccagggccaccggaatccccgaccggttcagtggaagcggaagcggaaccgattttactttgacgatttctagactggagccagaggatttcgccgtttactattgtcaacagtacggaagcagcccgtggacgtttggccagggcacgaaggtagaaatcaagggtggtggcggttcagcacaccccggccgtcccagagcagtgcccacacagtgcgacgtcccccccaacagccgcttcgattgcgcccctgacaaggccatcacccaggaacagtgcgaggcccgcggctgttgctacatccctgcaaagcaggggctgcagggagcccagatggggcagccctggtgcttcttcccacccagctaccccagctacaagctggagaacctgagctcctctgaaatgggctacacggccaccctgacccgtaccacccccaccttcttccccaaggacatcctgaccctgcggctggacgtgatgatggagactgagaaccgcctccacttcacgatcaaagatccagctaacaggcgctacgaggtgcccttggagaccccgcatgtccacagccgggcaccgtccccactctacagcgtggagttctccgaggagcccttcggggtgatcgtgcgccggcagctggacggccgcgtgctgctgaacacgacggtggcgcccctgttctttgcggaccagttccttcagctgtccacctcgctgccctcgcagtatatcacaggcctcgccgagcacctcagtcccctgatgctcagcaccagctggaccaggatcaccctgtggaaccgggaccttgcgcccacgcccggtgcgaacctctacgggtctcaccctttctacctggcgctggaggacggcgggtcggcacacggggtgttcctgctaaacagcaatgccatggatgtggtcctgcagccgagccctgcccttagctggaggtcgacaggtgggatcctggatgtctacatcttcctgggcccagagcccaagagcgtggtgcagcagtacctggacgttgtgggatacccgttcatgccgccatactggggcctgggcttccacctgtgccgctggggctactcctccaccgctatcacccgccaggtggtggagaacatgaccagggcccacttccccctggacgtccagtggaacgacctggactacatggactcccggagggacttcacgttcaacaaggatggcttccgggacttcccggccatggtgcaggagctgcaccagggcggccggcgctacatgatgatcgtggatcctgccatcagcagctcgggccctgccgggagctacaggccctacgacgagggtctgcggaggggggttttcatcaccaacgagaccggccagccgctgattgggaaggtatggcccgggtccactgccttccccgacttcaccaaccccacagccctggcctggtgggaggacatggtggctgagttccatgaccaggtgcccttcgacggcatgtggattgacatgaacgagccttccaacttcatcaggggctctgaggacggctgccccaacaatgagctggagaacccaccctacgtgcctggggtggttggggggaccctccaggcggccaccatctgtgcctccagccaccagtttctctccacacactacaacctgcacaacctctacggcctgaccgaagccatcgcctcccacagggcgctggtgaaggctcgggggacacgcccatttgtgatctcccgctcgacctttgctggccacggccgatacgccggccactggacgggggacgtgtggagctcctgggagcagctcgcctcctccgtgccagaaatcctgcagtttaacctgctgggggtgcctctggtcggggccgacgtctgcggcttcctgggcaacacctcagaggagctgtgtgtgcgctggacccagctgggggccttctaccccttcatgcggaaccacaacagcctgctcagtctgccccaggagccgtacagcttcagcgagccggcccagcaggccatgaggaaggccctcaccctgcgctacgcactcctcccccacctctacacactgttccaccaggcccacgtcgcgggggagaccgtggcccggcccctcttcctggagttccccaaggactctagcacctggactgtggaccaccagctcctgtggggggaggccctgctcatcaccccagtgctccaggccgggaaggccgaagtgactggctacttccccttgggcacatggtacgacctgcagacggtgccagtagaggcccttggcagcctcccacccccacctgcagctccccgtgagccagccatccacagcgaggggcagtgggtgacgctgccggcccccctggacaccatcaacgtccacctccgggctgggtacatcatccccctgcagggccctggcctcacaaccacagagtcccgccagcagcccatggccctggctgtggccctgaccaagggtggggaggcccgaggggagctgttctgggacgatggagagagcctggaagtgctggagcgaggggcctacacacaggtcatcttcctggccaggaataacacgatcgtgaatgagctggtacgtgtgaccagtgagggagctggcctgcagctgcagaaggtgactgtcctgggcgtggccacggcgccccagcaggtcctctccaacggtgtccctgtctccaacttcacctacagccccgacaccaaggtcctggacatctgtgtctcgctgttgatgggagagcagtttctcgtcagctggtgt

SEQ ID NO: 195 - DNA, 3384 bp, synthetic construct
  misc_feature 1..3384: note = Synthetic
  source 1..3384: mol_type = other DNA
caggtgcaactacaggagtctggcccaaaagtggtgaaaccttctgagacccttagtctcacctgcactgtctctggtggctccataagtagttattattggaattggatcagacagtccccagggaagggactggagtggattggatataccaaaagaggctatacagattacaatccctccctcaggagtagagtcactatatcagaagacacatccaaaaatcagttcagtctgaggatcagctctgtgacagctgcagacacagcagtatattactgtgcacaaatgggttggggatcccatgcttttgatatgtggggccaagggacaatggttgcagtatcttcaggaggaagtggtggaggagggtcaggaggtggaggatctggtggtgaaatagttttgacacagagtccaggcacactgtcactctctccaggggaaagagccaccttgtcatgtagagcaagtcagtcagtctctagctcttatctggcctggtaccagcagaagccaggacaggctcctagactcctgatttatggggcaagttccagggctacaggaatcccagatagatttagtggatctggatctggaactgattttactttgacaatttctagactggagccagaggattttgctgtttattattgtcaacagtatggatctagcccatggacatttggacagggcactaaagtagaaataaagggtggtggaggttcagcacacccaggcagacctagagcagtgcccacacaatgtgatgtcccccccaactcaagatttgattgtgcccctgacaaggccatcacccaagaacagtgtgaggccagaggctgttgctatatccctgcaaagcaggggttacagggagcccagatggggcagccatggtgcttcttcccacccagctacccttcttacaaactggaaaacctgagctcctctgaaatgggctacacagccacactgaccagaaccacccccaccttctttcccaaagatatcctgaccttaagactggatgtgatgatggaaactgaaaatagattacactttacaattaaagatccagctaacaggagatatgaagtgcccttggagaccccacatgttcattcaagagcacctagcccactctactctgtggagttctcagaagagccatttggggtgattgtgagaagacaattggatggaagagtgctgctgaatacaacagtggctccccttttttttgcagaccaatttcttcagctgtctaccagtctgcccagccagtatatcacaggcctggctgaacatctcagtcccttgatgctcagcaccagctggaccaggattaccttatggaatagagaccttgccccaactccaggtgccaacctctatgggtctcaccctttttacctggcccttgaggatggagggtctgcacatggggtgtttcttctaaacagcaatgcaatggatgtggtcctacagccatctcctgcccttagctggagatccacaggtgggatcctagatgtctatattttcctgggaccagagcctaagtcagtggtgcagcagtacctggatgttgtgggatatccattcatgcctccatactggggcctgggcttccatctgtgcagatggggatattcctccacagctatcacaagacaagtggtggagaatatgaccagggcccacttccccctggatgtccagtggaatgaccttgactacatggactccagaagggatttcacatttaacaaggatggcttcagagacttccctgccatggtgcaggaactgcaccaaggaggcagaagatacatgatgatagtggatcctgccatcagtagctctggccctgctgggagctatagaccctatgatgagggtctgagaaggggggttttcatcacaaatgagactggccaacctctgattgggaaggtatggccagggtccactgctttcccagacttcactaacccaacagccctggcctggtgggaggacatggtagctgaattccatgaccaggtgccttttgatggcatgtggattgacatgaatgaaccttccaacttcatcaggggctctgaggatggctgccccaacaatgagctggaaaacccaccttatgttcctggggtggttggtgggaccctccaggcagccaccatatgtgcctccagccaccagtttctctccacacactataacctccacaacctatatggactgacagaagccattgcctcccatagggcactggtgaaggctagaggtacaagaccatttgtgatatctagaagcacttttgctggccatggcagatatgcaggccactggactggagatgtttggagctcttgggagcagctggcctccagtgtgccagaaattctgcagtttaatctactaggggtgcctttggtaggggctgatgtctgtggctttctgggcaacacctcagaagagctttgtgtgagatggacccaactgggggccttctatcccttcatgagaaaccacaatagcctgctcagtttgccccaggagccatacagcttctcagagccagcccagcaggccatgaggaaggcccttactttaagatatgcactcctcccccacttgtacacactgtttcaccaggcccatgttgcaggagaaactgtggccagacccttgttcctggagttccctaaggactcttcaacctggactgtggaccaccaactcctctggggggaggccctcctcatcacaccagttctccaggcagggaaggctgaagttactggctacttccccttgggcacatggtatgaccttcagacagttccagtagaggcacttggcagcctcccacccccacctgcagctcccagagagccagcaattcactctgaagggcaatgggtgactctgccagccccactggacaccattaatgtccatttaagagctggttatatcatacccctgcagggccctggcctcacaaccacagagtccagacagcagcctatggctctggctgtagcattgactaaaggtggggaggcaagaggggagttattctgggatgatggagagtcactggaagtgttggagagaggggcatacacacaggttatcttcttggcaaggaataacacaatagtgaatgagttagtaagagtaaccagtgagggagctggcctgcagttacagaaggtgactgtccttggagtggccactgccccccagcaagtcctatccaatggtgtccctgtatccaacttcacctacagcccagacacaaaggtcctggatatctgtgtctccctgttgatgggagaacagtttctggtcagctggtgt

SEQ ID NO: 196 - DNA, 3384 bp, synthetic construct
  misc_feature 1..3384: note = Synthetic
  source 1..3384: mol_type = other DNA
caggtccagctgcaagagtctggccccaaggtggtcaagccctctgagacactgagcctgacctgcacagtgtctggtggcagcatcagcagctactactggaactggatcagacagagccctggcaaaggcctggaatggattggctacaccaagagaggctacacagactacaaccccagcctgagaagcagagtgaccatctctgaggacaccagcaagaaccagttcagcctgaggatcagctctgtgacagctgctgacacagcagtgtactactgtgcccagatgggctggggcagccatgcctttgatatgtggggccagggcacaatggtggctgtgtccagtgggggctcaggaggaggtggctcaggaggtggaggttcaggaggggagattgtgctgacccagtctcctggcacactgtctctgagccctggggaaagagccacactgagctgtagagccagccagtctgtgtcctctagctacctggcctggtatcagcagaagcctggacaggctcccagactgctgatctatggggcctcttctagagccacaggcatccctgacagattcagtggcagtggctctggcacagacttcaccctgaccatcagcagactggaacctgaggactttgctgtgtactattgccagcagtatggcagcagcccctggacatttggacagggcaccaaggtggaaatcaaaggtggtggtggctctgcccatcctggcagacctagagctgtgcccacacagtgtgatgtgcctccaaacagcagatttgactgtgcccctgacaaggccatcacacaagagcagtgtgaagccagaggctgctgttacatccctgccaagcaaggactgcaaggggctcagatgggacagccctggtgcttcttcccaccatcttaccccagctacaagctggaaaacctgagcagctctgagatgggctacactgctacactgaccagaaccacacctacattcttcccaaaggacatcctgacactgaggctggatgtgatgatggaaacagagaacaggctgcacttcaccatcaaggaccctgccaatagaagatatgaggtgcccctggaaacccctcatgtgcactctagagccccatctccactgtactctgtggaattttctgaggaaccctttggggtcatagtcagaaggcagctggatggcagagtgctgctgaacacaactgtggcccctctgttctttgctgatcagttcctgcagctgagcaccagcctgcctagccagtatatcacaggcctggcagagcacctgtctccactgatgctgagcacatcctggaccagaatcaccctgtggaacagagacctggctcccacacctggggccaacctgtatggctctcaccccttctatctggccctggaagatggtggttcagcccatggtgtctttctgctgaactccaatgccatggatgtggtgctgcagccctctcctgctctgtcttggagaagcactggtggcatcctggatgtgtacatctttctgggccctgagcctaagtctgtggtgcagcagtacctggatgttgtgggctaccccttcatgcctccttattggggcctgggcttccacctgtgcagatggggatacagcagcacagccatcaccagacaggttgtggaaaacatgaccagagcacacttcccactggatgtgcagtggaatgacctggactacatggacagcagaagggacttcaccttcaacaaggatggcttcagagacttccctgccatggtgcaagagctgcaccaaggtggtagaagatatatgatgattgtggacccagccatcagctcctctggaccagctggcagctacagaccctatgatgagggactgagaagaggggtgttcatcaccaatgagacaggccagcctctgattggcaaagtgtggccaggctccacagcctttccagatttcacaaaccccacagctctggcttggtgggaagatatggtggcagagttccatgatcaggtgccctttgatggcatgtggattgacatgaatgagcccagcaacttcatcaggggctctgaggatggatgccccaacaatgaactggaaaatcctccttatgtgcctggtgttgttggagggacactgcaggcagccacaatttgtgccagctctcaccagtttctgagcacccactacaacctgcacaatctgtatggcctgactgaggccattgccagccacagggctcttgtgaaggctagaggcaccagaccttttgtgatcagcaggtccacctttgctggccatggcagatatgctggccactggactggggatgtgtggtctagttgggagcagctggctagctctgtgcctgagatcctgcagttcaacctgctgggagtgccccttgttggagcagatgtgtgtggcttcctgggcaacacctcagaggaactgtgtgtcagatggactcagctgggagcattctaccctttcatgagaaaccacaacagcctgctgagcctgcctcaagagccttacagcttttctgagccagcacagcaggccatgagaaaggccctgactctgagatatgccctgctgcctcacctgtacaccctgttccatcaggctcatgtggctggggagactgtggctagacccctgttcctggaattccccaaggacagctccacctggacagtggatcatcagctgctgtggggagaagccctgctgattacacctgtgctgcaggctggcaaggctgaagtgacaggctacttccctcttggcacttggtatgacctgcagacagtgcctgtggaagctctgggatctctgcctccacctcctgctgctcctagagagcctgccattcactctgaaggccagtgggttaccctgcctgctccactggataccatcaatgtgcatctgagagcaggctacatcatccctctgcaaggccctggcctgaccaccacagaatctagacagcagccaatggcactggctgtggccctgaccaaaggtggagaagctagaggggagctgttctgggatgatggggagagcctggaagtgctggaaagaggggcctatacacaagtgatttttctggctaggaacaataccattgtgaatgagcttgtcagagtcacctctgaaggtgctggcctgcagctccagaaagtgacagtgcttggagtggccacagcaccccagcaagtgctgtctaatggggtgccagtgtccaacttcacatacagccctgataccaaggtcctggacatctgtgtgtccctgcttatgggagagcagttcctggtgtcttggtgc

SEQ ID NO: 197 - DNA, 3384 bp, synthetic construct
  misc_feature 1..3384: note = Synthetic
  source 1..3384: mol_type = other DNA
caagtgcagctgcaggagtctggccctaaggtggtgaaaccatctgagacattgtccctgacttgcactgtatcaggagggtccattagtagttactactggaattggatcagacagagcccagggaagggactagagtggattggctacactaagagagggtacactgactacaaccccagcctcaggtctagagtgactatctctgaggacacctctaagaatcagttctccctgagaataagttctgtgacagcagctgacacagctgtgtactactgtgcccagatgggctggggcagtcatgcctttgacatgtggggccagggaacaatggtagctgtgagctctggaggatcaggggggggaggctctgggggggggggcagtgggggagagattgtcctaacccagtctcctggcaccctttccctttcccctggagagagagccactcttagctgcagagccagccagtctgtctccagctcttacctagcatggtaccaacaaaaacctggacaggctcctagacttcttatctatggagctagtagcagggccacaggcatcccagacaggttttcaggttctggctctggcacagacttcaccctgaccatatccagactggagccagaagattttgcagtctactactgccaacagtatggaagcagcccttggacatttggacaaggcaccaaggttgaaatcaaagggggagggggttctgcccaccctggcagacctagagcagtgcccacccagtgtgatgtgcctcctaacagcaggtttgactgtgcacctgacaaggccatcacccaggagcagtgtgaagccaggggttgctgctatatcccagccaaacagggtctgcagggagcccaaatgggccagccttggtgcttctttccaccctcttacccttcttacaagctggaaaacctatcttcaagtgagatgggctacacagccactctaacaagaaccacacctacctttttccccaaggacatcctcactctgagactggatgtaatgatggagactgaaaacagactccacttcaccattaaagacccagccaacagaagatatgaggtaccattggagaccccccatgtccacagcagagcacccagccccctatactcagtggaattctctgaggaaccttttggtgtcatagtgagaagacagctggatggcagagtgctcctcaacacaactgtggctccactgttttttgctgaccaattcctacagctgagcaccagcctgccctcccaatatatcacagggctggctgaacacctatcccctctgatgctgtccacctcctggaccaggatcactctgtggaacagggacttagcccctacccctggtgccaacctgtatggctctcacccattctacctggccctggaggatggaggttcagcccatggagtctttctcctgaactctaatgccatggatgtggtgctacagccatcccctgcattatcttggaggagcacaggaggaatcctggatgtatacatctttctgggcccagaaccaaagtcagttgtacagcagtaccttgatgtggtaggctaccccttcatgcctccatactggggtctgggcttccacctctgcagatggggctacagcagtacagctatcacaagacaggttgtggagaacatgacaagggctcacttccccctggatgtacagtggaatgacttggactacatggacagtagaagggacttcacattcaacaaggatggcttcagggacttccctgccatggtacaggaactccaccagggagggagaagatacatgatgattgtggacccagctatcagttctagtggtcctgcaggttcctacaggccctatgatgaaggcctcagaagaggagtgttcatcactaatgagacaggacagcctttgataggaaaggtctggcctggcagtacagctttcccagattttaccaatccaactgctttggcttggtgggaggacatggtggcagagttccatgaccaggtgccctttgatggcatgtggattgacatgaatgaaccatctaacttcatcagaggatcagaagatggatgccccaacaatgagctggagaaccctccttatgtgccaggtgtggtgggtggcaccctacaggctgcaaccatctgtgccagctcacaccagttcctgagtacacactacaatctacacaacctgtatggcctgactgaagctattgcctcacatagagcactagtcaaggccagagggaccaggccttttgttattagcagaagtacctttgctgggcatggcagatatgctgggcactggacaggtgatgtatggagcagctgggaacagttggcttcatctgttccagagatcctgcagttcaacctgttgggggtgcctttagtgggggcagatgtctgtggtttcttggggaacacctcagaggaactttgtgtcagatggacccaactgggggccttttacccctttatgagaaaccacaactctctgctcagcttgcctcaggaaccctattccttcagtgagcctgcccaacaggccatgaggaaggccctaaccctcagatatgcactgctgcctcacctgtacaccctttttcaccaggcccatgtggcaggtgagacagtagcaagacctctcttcttggagttccctaaagactcaagcacctggactgtggatcaccaactcctgtggggagaggctctgctgatcacacctgtactacaagctggtaaggctgaggtgacaggttacttccccctgggcacctggtatgatctgcagacagtccctgtagaggcactaggctctctgcctccccctcctgcagcccctagagagcctgctatccacagtgagggccaatgggtcaccctacctgctccactagacacaataaatgtgcacctgagagctggctatatcatccccctccagggaccaggtctgacaaccacagaatctagacaacagcccatggcactagcagttgccctgaccaagggaggtgaagccaggggtgagcttttctgggatgatggggagtccttggaggttctagaaagaggagcctacactcaggtcatcttcctggccagaaataacaccatagtgaatgagttggtgagagtgacctcagagggagctgggctccaactgcaaaaagtgacagtcttgggagtggccacagcaccacagcaggtcctcagcaatggggtgcctgtgagcaacttcacctactctccagacaccaaagtactggacatctgtgtgagcctgctgatgggtgagcaattcctggtgagctggtgc

SEQ ID NO: 198 - DNA, 3384 bp, synthetic construct
  misc_feature 1..3384: note = Synthetic
  source 1..3384: mol_type = other DNA
caagtgcagctgcaggagtctggccctaaggtggtgaaaccatctgagacattgtccctgacttgcactgtatcaggagggtccattagtagttactactggaattggatcagacagagcccagggaagggactagagtggattggctacactaagagagggtacactgactacaaccccagcctcaggtctagagtgactatctctgaggacacctctaagaatcagttctccctgagaataagttctgtgacagcagctgacacagctgtgtactactgtgcccagatgggctggggcagtcatgcctttgacatgtggggccagggaacaatggtagctgtgagctctggaggatcaggggggggaggctctggaggaggtggcagtgggggagagattgtcctaacccagtctcctggcaccctttccctttcccctggagagagagccactcttagctgcagagccagccagtctgtctccagctcttacctagcatggtaccaacaaaaacctggacaggctcctagacttcttatctatggagctagtagcagggccacaggcatcccagacaggttttcaggttctggctctggcacagacttcaccctgaccatatccagactggagccagaagattttgcagtctactactgccaacagtatggaagcagcccttggacatttggacaaggcaccaaggttgaaatcaaagggggagggggttctgcccaccctggcagacctagagcagtgcccacccagtgtgatgtgcctcctaacagcaggtttgactgtgcacctgacaaggccatcacccaggagcagtgtgaagccaggggttgctgctatatcccagccaaacagggtctgcagggagcccaaatgggccagccttggtgcttctttccaccctcttacccttcttacaagctggaaaacctatcttcaagtgagatgggctacacagccactctaacaagaaccacacctacctttttccccaaggacatcctcactctgagactggatgtaatgatggagactgaaaacagactccacttcaccattaaagacccagccaacagaagatatgaggtaccattggagaccccccatgtccacagcagagcacccagccccctatactcagtggaattctctgaggaaccttttggtgtcatagtgagaagacagctggatggcagagtgctcctcaacacaactgtggctccactgttttttgctgaccaattcctacagctgagcaccagcctgccctcccaatatatcacagggctggctgaacacctatcccctctgatgctgtccacctcctggaccaggatcactctgtggaacagggacttagcccctacccctggtgccaacctgtatggctctcacccattctacctggccctggaggatggaggttcagcccatggagtctttctcctgaactctaatgccatggatgtggtgctacagccatcccctgcattatcttggaggagcacaggaggaatcctggatgtatacatctttctgggcccagaaccaaagtcagttgtacagcagtaccttgatgtggtaggctaccccttcatgcctccatactggggtctgggcttccacctctgcagatggggctacagcagtacagctatcacaagacaggttgtggagaacatgacaagggctcacttccccctggatgtacagtggaatgacttggactacatggacagtagaagggacttcacattcaacaaggatggcttcagggacttccctgccatggtacaggaactccaccagggagggagaagatacatgatgattgtggacccagctatcagttctagtggtcctgcaggttcctacaggccctatgatgaaggcctcagaagaggagtgttcatcactaatgagacaggacagcctttgataggaaaggtctggcctggcagtacagctttcccagattttaccaatccaactgctttggcttggtgggaggacatggtggcagagttccatgaccaggtgccctttgatggcatgtggattgacatgaatgaaccatctaacttcatcagaggatcagaagatggatgccccaacaatgagctggagaaccctccttatgtgccaggtgtggtgggtggcaccctacaggctgcaaccatctgtgccagctcacaccagttcctgagtacacactacaatctacacaacctgtatggcctgactgaagctattgcctcacatagagcactagtcaaggccagagggaccaggccttttgttattagcagaagtacctttgctgggcatggcagatatgctgggcactggacaggtgatgtatggagcagctgggaacagttggcttcatctgttccagagatcctgcagttcaacctgttgggggtgcctttagtgggggcagatgtctgtggtttcttggggaacacctcagaggaactttgtgtcagatggacccaactgggggccttttacccctttatgagaaaccacaactctctgctcagcttgcctcaggaaccctattccttcagtgagcctgcccaacaggccatgaggaaggccctaaccctcagatatgcactgctgcctcacctgtacaccctttttcaccaggcccatgtggcaggtgagacagtagcaagacctctcttcttggagttccctaaagactcaagcacctggactgtggatcaccaactcctgtggggagaggctctgctgatcacacctgtactacaagctggtaaggctgaggtgacaggttacttccccctgggcacctggtatgatctgcagacagtccctgtagaggcactaggctctctgcctccccctcctgcagcccctagagagcctgctatccacagtgagggccaatgggtcaccctacctgctccactagacaccatcaatgtgcacctgagagctggctatatcatccccctccaaggaccaggtctgacaaccacagaatctagacaacagcccatggcactagcagttgccctgaccaagggaggtgaagccaggggtgagcttttctgggatgatggggagtccttggaggttctagaaagaggagcctacactcaggtcatcttcctggccagaaataacaccatagtgaatgagttggtgagagtgacctcagagggagctgggctccaactgcaaaaagtgacagtcttgggagtggccacagcaccacagcaggtcctcagcaatggggtgcctgtgagcaacttcacctactctccagacaccaaagtactggacatctgtgtgagcctgctgatgggtgagcaattcctggtgagctggtgc

SEQ ID NO: 199 - DNA, 3384 bp, synthetic construct
  misc_feature 1..3384: note = Synthetic
  source 1..3384: mol_type = other DNA
caggtacagctgcaggagtctgggcccaaagtagtgaaaccctctgaaaccctatcactgacctgcacagtttcaggtggaagcattagcagttactactggaactggatcagacagagtccaggcaagggtctggaatggataggctacaccaagagaggttacactgactacaacccatcccttcggtccagagtgaccatttcagaggacacatctaaaaaccagttctccctgagaatcagttctgtgactgctgctgacacagctgtgtactactgtgctcagatgggctggggctcccatgcctttgacatgtggggccagggcaccatggttgcagtgagctctggtggctctggaggaggtggatctggagggggaggctcaggaggtgagattgtgctgacccaaagtcctggcacattgagcctgagccctggagaaagggccactctctcttgcagggccagccagtctgtgtccagttcctacctggcttggtaccaacagaagcctggccaggcccctaggttgctgatctatggagccagctccagagccacagggatccctgacagattctcaggctctggctctggcacagacttcaccctgaccatcagcagactagagcctgaagactttgctgtgtactactgccagcagtatggaagcagcccttggacttttgggcagggcacaaaggttgagatcaaaggaggaggaggctcagcccaccctggcagacccagagcagtccccacccagtgtgatgtacctcccaacagcagatttgactgtgcccctgacaaggccatcacccaggaacagtgtgaggccagggggtgctgctatattcctgccaagcagggcctgcagggtgcccaaatgggccagccttggtgcttcttccctcccagctacccctcttacaagttagaaaacctgtctagctctgaaatgggctacacagccaccctgaccagaacaacccctactttcttcccaaaggacattttaaccctgaggctggatgtgatgatggagactgagaatagactgcacttcaccatcaaggacccagccaacagaaggtatgaagtgcctctggagaccccccatgtgcactctagggcacctagccctctatactcagtggagttctctgaagaaccttttggggtcatagtgaggaggcaactggatggcagagtgcttctgaacaccacagtggcccccctgttctttgctgaccaattcctgcagctgagtaccagcctgccttcacagtacatcacaggcctggctgaacacctgagccctctgatgttgagcaccagctggaccagaatcaccttatggaacagagacttagccccaacccctggagccaacctctatggaagccaccctttctacctggccctggaggatggaggctctgcccatggtgttttcctcctgaactccaatgccatggatgttgtgctgcaaccttcccctgctctgagctggagatcaacagggggtatcttagatgtgtacatcttcctgggccctgaaccaaagtctgtggtacagcagtacctggatgtagtgggctaccccttcatgcccccctactggggcctaggcttccacctgtgcaggtgggggtactctagcactgccatcaccagacaggtggtggagaacatgactagagcccactttccattggatgtgcaatggaatgaccttgactacatggactcaaggagggacttcacattcaacaaggatggcttcagagactttcctgccatggtgcaggagctgcaccaagggggcagaagatacatgatgattgtggacccagccatctcctcttcaggacctgctggttcttatagaccttatgatgagggccttagaagaggtgtgttcattaccaatgaaactggacagcctctgattggcaaggtgtggccaggctccactgccttccctgactttacaaaccctacagccctggcctggtgggaggatatggtagctgagttccatgaccaggtgccttttgatggcatgtggatagacatgaatgaaccaagtaacttcatcagaggtagtgaggatggctgtcccaacaatgagctggagaaccccccatatgttcctggagtggtgggtggtactctccaggctgctaccatttgtgcctcaagtcaccagttcctgagcacccactacaacctgcacaacctgtatggcctgactgaggctattgctagccacagggctctggtgaaggccaggggaacaagaccttttgtgatttctaggtcaacatttgcaggccatggaagatatgctggtcactggacaggtgatgtgtggtcttcctgggaacagctggccagttcagtgccagagatcctgcagttcaacctcctaggagtgccactggtgggggcagatgtttgtggctttctggggaacacctctgaagagctgtgtgtgagatggacccagctgggagccttctacccattcatgaggaaccacaacagtttgctttccctacctcaggagccctacagcttctctgagccagcccaacaggccatgagaaaggccttgacacttagatatgccctactgccccacttgtataccttattccaccaggctcatgtggctggtgagactgtggccaggcccctgttcctggagttccccaaggacagctccacctggacagtagaccatcagctcctgtggggagaggccctgcttatcacccctgtgctccaagctggcaaagcagaggtgacaggttacttccctctgggcacctggtatgatctccagacagtgcctgtggaagcattaggttctttgcctcctccacctgcagcccccagagagcctgccatccactctgaaggccagtgggtcaccctgcctgcccccctggacacaatcaatgtccacctgagagctggttacataatccctctgcaagggcctggcttgaccaccacagaaagcagacagcagcctatggccctggctgtagctctgactaagggaggtgaggcaagaggggagctgttctgggatgatggagagagcctggaagtgctagagagaggagcctacacccaagtcatcttcttggccaggaacaataccatagtgaatgagctggtgagggtgacctctgaaggggctggccttcaactccagaaggtgactgttctgggagtggccacagccccacagcaggtgctgtccaatggtgtgcctgtcagcaacttcacatacagcccagatactaaggtgctggatatctgtgttagccttctcatgggtgaacagttcttagtgtcatggtgc

SEQ ID NO: 200 - DNA, 3384 bp, synthetic construct
  misc_feature 1..3384: note = Synthetic
  source 1..3384: mol_type = other DNA
caggtgcagctgcaggagtctggccctaaggttgtgaaaccttctgagaccctgagcctgacttgcacagtgtcagggggctctatcagctcatactactggaactggatcagacaaagccctggcaagggcctggaatggattggctacactaagagaggctacacagactacaaccctagcctcaggagccgagtgaccatctcagaggacacatccaagaaccaattctcactgcggattagctctgtgacagctgctgacacagctgtgtactactgtgcccagatgggctggggcagccatgcctttgacatgtggggccagggcaccatggtggctgtgagctctgggggctcaggaggaggtggctcaggcggtggcggctccgggggggaaattgtcctcacccagagccctggcaccctgagcctgagccctggcgaaagagccacactgagctgcagggccagccagtcagtgtccagcagctacctggcttggtaccagcagaagcctggccaggcgccccggctgctgatttatggtgcctcatcccgggccacaggaatccctgacagatttagtggcagtggcagcgggactgactttacactgaccatcagcagactggaacctgaggattttgcagtgtactactgccagcagtatggcagcagcccttggacctttggccagggcaccaaggtggaaatcaagggaggggggggctcagcccaccctggcagacctagagctgtgcctacccagtgtgatgtgccacctaactccagatttgactgtgcccctgacaaggccatcacccaagagcagtgcgaggccaggggatgctgctacatccctgccaaacagggcctgcagggagcccagatgggccaaccctggtgctttttccctccctcttacccctcctacaagctggagaacctgagctcctcagagatgggctacacagctaccctgaccagaaccacccccaccttctttcctaaggacatcctgaccctgagactggatgtgatgatggaaacagagaaccggctgcacttcacaatcaaggacccagccaacagaagatatgaagttcccctggagacccctcatgtgcactccagggcccccagccccctatacagcgtggagttctctgaggagccttttggcgtcattgtgagaagacaactggatggcagagtgctgttgaacaccacagtggcccctctcttctttgctgaccaattcctgcagctgagcaccagtctgcccagccagtacatcactggcctggctgagcacctgtctcccttaatgctgtccaccagctggacaaggatcaccctgtggaaccgggacttggcccccacgcctggagccaacctatacggctcccaccccttctacctggccctggaggacggaggctcagcccatggagttttcctgctgaactctaacgccatggatgtggtgctgcaacctagccctgccctgagctggagaagcactggcggaattctcgatgtctacatcttcctgggacctgaaccaaagtcagtggtgcagcagtacctggatgtggtgggctaccccttcatgccaccttactggggcctgggatttcacctgtgcagatggggctactccagcacagccatcaccagacaggtggtggagaacatgacccgggcccacttccccctggatgtccagtggaatgacttagactacatggatagcagaagagacttcaccttcaacaaggatggctttagagacttccctgccatggtgcaggaactgcaccagggtggcagaagatacatgatgattgtggaccctgccatttctagctctggcccagcaggctcctacaggccctatgatgagggactgcggagaggggtcttcatcaccaatgagacaggccagccactgatcggcaaggtgtggcctggatccacagccttcccagacttcaccaaccctacagcccttgcctggtgggaagacatggtggccgaattccacgaccaggtgccctttgatggcatgtggatcgacatgaatgagcctagcaatttcatcagaggaagtgaggatggctgccccaacaatgaattagaaaacccgccctatgtgcctggcgttgtgggaggcaccctccaggctgccaccatctgtgccagcagccaccagttcttatccacacactacaacctgcacaacctgtatggcctgaccgaagccattgccagccacagagcgctggtgaaagccaggggcacccggccttttgtgatcagcagaagcaccttcgctggccatggcaggtatgccggacattggacaggagatgtatggagctcttgggagcagttggccagctctgtgcctgagatcctgcagttcaacctactgggggtccctctggtgggagcagatgtctgcggcttcctaggcaacacctcagaggaactgtgcgtaagatggacccagctgggggccttctaccctttcatgaggaaccacaactctctgctgagcctgcctcaggagccatacagcttctctgagccagcccagcaggccatgagaaaggccctgaccctgagatatgccttactgccccacctgtacacactgttccaccaggcccatgtggctggggagacagtggcacggcccctgttcttggagttccccaaggactccagcacctggacagtggaccaccagctgctctggggagaggccctgctcatcaccccagtgctgcaggctggcaaggctgaagtcacaggctacttccccctgggcacctggtatgacctccaaactgtgccagtggaggccctgggcagcctgcctcctccccctgctgctcctagagagcctgccatccactcggagggccagtgggtgacactgcctgcccccctagacaccatcaatgttcacctgagagcaggctacatcatcccactgcaaggccctggcctgaccaccactgagagcagacagcagcccatggccctggcagttgccctgaccaagggcggcgaagccagaggagaactgttctgggatgatggcgaatctttggaagtgctggagagaggggcctacacccaggtgatcttcctggcccggaacaacactatagtgaatgaactggtgcgggtgacatcagagggtgcaggcctgcagctgcaaaaagtgacagtgctgggtgtggcaacagcccctcagcaggtactatccaatggagtgccagtgagcaacttcacctacagcccagacactaaggtgctagacatctgtgtttctctgctgatgggagagcaattcctggtgagctggtgc

SEQ ID NO: 201 - DNA, 3384 bp, synthetic construct
  misc_feature 1..3384: note = Synthetic
  source 1..3384: mol_type = other DNA
caggtgcagctgcaggagtctggccctaaggttgtgaaaccttctgagaccctgagcctgacttgcacagtgtcagggggctctatcagctcatactactggaactggatcagacaaagccctggcaagggcctggaatggattggctacactaagagaggctacacagactacaaccctagcctcaggagccgagtgaccatctcagaggacacatccaagaaccaattctcactgcggattagctctgtgacagctgctgacacagctgtgtactactgtgcccagatgggctggggcagccatgcctttgacatgtggggccagggcaccatggtggctgtgagctctgggggctcaggaggaggtggctcaggcggtggcggctccgggggggaaatcgtgctcacccagagccctggcaccctgagcctgagccctggcgaaagagccacactgagctgcagggccagccagtcagtgtccagcagctacctggcttggtaccagcagaagcctggccaggcgccccggctgctgatttatggtgcctcatcccgggccacaggaatccctgacagatttagtggcagtggcagcgggactgactttacactgaccatcagcagactggaacctgaggattttgcagtgtactactgccagcagtatggcagcagcccttggacctttggccagggcaccaaggtggaaatcaagggaggggggggctcagcccaccctggcagacctagagctgtgcctacccagtgtgatgtgccacctaactccagatttgactgtgcccctgacaaggccatcacccaagagcagtgcgaggccaggggatgctgctacatccctgccaaacagggcctgcagggagcccagatgggccaaccctggtgctttttccctccctcttacccctcctacaagctggagaacctgagctcctcagagatgggctacacagctaccctgaccagaaccacccccaccttctttcctaaggacatcctgaccctgagactggatgtgatgatggaaacagagaaccggctgcacttcacaatcaaggacccagccaacagaagatatgaagttcccctggagacccctcatgtgcactccagggcccccagccccctatacagcgtggagttctctgaggagccttttggcgtcattgtgagaagacaactggatggcagagtgctgttgaacaccacagtggcccctctcttctttgctgaccaattcctgcagctgagcaccagtctgcccagccagtacatcactggcctggctgagcacctgtctcccttaatgctgtccaccagctggacaaggatcaccctgtggaaccgggacttggcccccacgcctggagccaacctatacggctcccaccccttctacctggccctggaggacggaggctcagcccatggagttttcctgctgaactctaacgccatggatgtggtgctgcaacctagccctgccctgagctggagaagcactggcggaattctcgatgtctacatcttcctgggacctgaaccaaagtcagtggtgcagcagtacctggatgtggtgggctaccccttcatgccaccttactggggcctgggatttcacctgtgcagatggggctactccagcacagccatcaccagacaggtggtggagaacatgacccgggcccacttccccctggatgtccagtggaatgacttagactacatggatagcagaagagacttcaccttcaacaaggatggctttagagacttccctgccatggtgcaggaactgcaccagggtggcagaagatacatgatgatcgttgaccctgccatttctagctctggcccagcaggctcctacaggccctatgatgagggactgcggagaggggtcttcatcaccaatgagacaggccagccactgatcggcaaggtgtggcctggatccacagccttcccagacttcaccaaccctacagcccttgcctggtgggaagacatggtggccgaattccacgaccaggtgccctttgatggcatgtggatcgacatgaatgagcctagcaatttcatcagaggaagtgaggatggctgccccaacaatgaattagaaaacccgccctatgtgcctggcgttgtgggaggcaccctccaggctgccaccatctgtgccagcagccaccagttcttatccacacactacaacctgcacaacctgtatggcctgaccgaagccattgccagccacagagcgctggtgaaagccaggggcacccggccttttgtgatcagcagaagcaccttcgctggccatggcaggtatgccggacattggacaggagacgtctggagctcttgggagcagttggccagctctgtgcctgagatcctgcagttcaacctactgggggtccctctggtgggagcagatgtctgcggcttcctaggcaacacctcagaggaactgtgcgtaagatggacccagctgggggccttctaccctttcatgaggaaccacaactctctgctgagcctgcctcaggagccatacagcttctctgagccagcccagcaggccatgagaaaggccctgaccctgagatatgccttactgccccacctgtacacactgttccaccaggcccacgtcgctggggagacagtggcacggcccctgttcttggagttccccaaggactccagcacctggacagtggaccaccagctgctctggggagaggccctgctcatcaccccagtgctgcaggctggcaaggctgaagtcacaggctacttccccctgggcacctggtatgacctccaaactgtgccagtggaggccctgggcagcctgcctcctccccctgctgctcctagagagcctgccatccactcggagggccagtgggtgacactgcctgcccccctagacaccatcaatgttcacctgagagcaggctacatcatcccactgcaaggccctggcctgaccaccactgagagcagacagcagcccatggccctggccgttgccctgaccaagggcggcgaagccagaggagaactgttctgggatgatggcgaatctttggaagtgctggagagaggggcctacacccaggtgatcttcctggcccggaacaacactatcgttaatgaactggtgcgggtgacatcagagggtgcaggcctgcagctgcaaaaagtgacagtgctgggtgtggcaacagcccctcagcaggtactatccaatggagtgccagtgagcaacttcacctacagcccagacactaaggtgctagacatctgtgtttctctgctgatgggagagcaattcctggtgagctggtgc

SEQ ID NO: 202 - DNA, 3384 bp, synthetic construct
  misc_feature 1..3384: note = Synthetic
  source 1..3384: mol_type = other DNA
caggtgcagctgcaggaatctggacctaaggtggtgaagccttctgaaacactgtctctgacatgtacagtgtctggaggatctatctcttcttattattggaattggatcagacagtctcctggaaagggactggaatggatcggatatacaaagagaggatatacagattataatccttctctgagatctagagtgacaatctctgaagatacatctaagaatcagttttctctgagaatctcttctgtgacagctgctgatacagctgtgtattattgtgctcagatgggatggggatctcatgcttttgatatgtggggacagggaacaatggtggctgtgtcttctggaggatctggaggaggaggatctggaggaggaggatctggaggagaaatcgtgctgacacagtctcctggaacactgtctctgtctcctggagaaagagctacactgtcttgtagagcttctcagtctgtgtcttcttcttatctggcttggtatcagcagaagcctggacaggctcctagactgctgatctatggagcttcttctagagctacaggaatccctgatagattttctggatctggatctggaacagattttacactgacaatctctagactggaacctgaagattttgctgtgtattattgtcagcagtatggatcttctccttggacatttggacagggaacaaaggtggaaatcaagggaggaggaggatctgctcatcctggaagacctagagctgtgcctacacagtgtgatgtgcctcctaattctagatttgattgtgctcctgataaggctatcacacaggaacagtgtgaagctagaggatgttgttatatccctgctaagcagggactgcagggagctcagatgggacagccttggtgtttttttcctccttcttatccttcttataagctggaaaatctgtcttcttctgaaatgggatatacagctacactgacaagaacaacacctacattttttcctaaggatatcctgacactgagactggatgtgatgatggaaacagaaaatagactgcattttacaatcaaggatcctgctaatagaagatatgaagtgcctctggaaacacctcatgtgcattctagagctccttctcctctgtattctgtggaattttctgaagaaccttttggagtgatcgtgagaagacagctggatggaagagtgctgctgaatacaacagtggctcctctgttttttgctgatcagtttctgcagctgtctacatctctgccttctcagtatatcacaggactggctgaacatctgtctcctctgatgctgtctacatcttggacaagaatcacactgtggaatagagatctggctcctacacctggagctaatctgtatggatctcatcctttttatctggctctggaagatggaggatctgctcatggagtgtttctgctgaattctaatgctatggatgtggtgctgcagccttctcctgctctgtcttggagatctacaggaggaatcctggatgtgtatatctttctgggacctgaacctaagtctgtggtgcagcagtatctggatgtggtgggatatccttttatgcctccttattggggactgggatttcatctgtgtagatggggatattcttctacagctatcacaagacaggtggtggaaaatatgacaagagctcattttcctctggatgtgcagtggaatgatctggattatatggattctagaagagattttacatttaataaggatggatttagagattttcctgctatggtgcaggaactgcatcagggaggaagaagatatatgatgatcgtggatcctgctatctcttcttctggacctgctggatcttatagaccttatgatgaaggactgagaagaggagtgtttatcacaaatgaaacaggacagcctctgatcggaaaggtgtggcctggatctacagcttttcctgattttacaaatcctacagctctggcttggtgggaagatatggtggctgaatttcatgatcaggtgccttttgatggaatgtggatcgatatgaatgaaccttctaattttatcagaggatctgaagatggatgtcctaataatgaactggaaaatcctccttatgtgcctggagtggtgggaggaacactgcaggctgctacaatctgtgcttcttctcatcagtttctgtctacacattataatctgcataatctgtatggactgacagaagctatcgcttctcatagagctctggtgaaggctagaggaacaagaccttttgtgatctctagatctacatttgctggacatggaagatatgctggacattggacaggagatgtgtggtcttcttgggaacagctggcttcttctgtgcctgaaatcctgcagtttaatctgctgggagtgcctctggtgggagctgatgtgtgtggatttctgggaaatacatctgaagaactgtgtgtgagatggacacagctgggagctttttatccttttatgagaaatcataattctctgctgtctctgcctcaggaaccttattctttttctgaacctgctcagcaggctatgagaaaggctctgacactgagatatgctctgctgcctcatctgtatacactgtttcatcaggctcatgtggctggagaaacagtggctagacctctgtttctggaatttcctaaggattcttctacatggacagtggatcatcagctgctgtggggagaagctctgctgatcacacctgtgctgcaggctggaaaggctgaagtgacaggatattttcctctgggaacatggtatgatctgcagacagtgcctgtggaagctctgggatctctgcctcctcctcctgctgctcctagagaacctgctatccattctgaaggacagtgggtgacactgcctgctcctctggatacaatcaatgtgcatctgagagctggatatatcatccctctgcagggacctggactgacaacaacagaatctagacagcagcctatggctctggctgtggctctgacaaagggaggagaagctagaggagaactgttttgggatgatggagaatctctggaagtgctggaaagaggagcttatacacaggtgatctttctggctagaaataatacaatcgtgaatgaactggtgagagtgacatctgaaggagctggactgcagctgcagaaggtgacagtgctgggagtggctacagctcctcagcaggtgctgtctaatggagtgcctgtgtctaattttacatattctcctgatacaaaggtgctggatatctgtgtgtctctgctgatgggagaacagtttctggtgtcttggtgt

SEQ ID NO: 203 - DNA, 11 bp, synthetic construct
  misc_feature 1..11: note = Synthetic
  source 1..11: mol_type = other DNA
ggggggggggg

SEQ ID NO: 204 - DNA, 11 bp, synthetic construct
  misc_feature 1..11: note = Synthetic
  source 1..11: mol_type = other DNA
ggaggaggtgg

SEQ ID NO: 205 - DNA, 2649 bp, synthetic construct
  misc_feature 1..2649: note = Synthetic
  source 1..2649: mol_type = other DNA
gcacatccaggcaggcccagagcagttcccacacaatgtgatgtcccccccaactcaaggtttgattgtgcccctgataaggctatcactcaggaacagtgtgaagctaggggctgttgctacattcctgcaaagcagggactgcagggagcccagatggggcagccttggtgctttttcccaccatcttaccccagctacaaactagagaacctgagctcctctgaaatgggctacactgccactctaaccagaaccacccccactttctttcccaaggacatcctgaccctgagactagatgtgatgatggagactgagaataggctccactttactatcaaagatccagctaacaggaggtatgaggtgcctttggagacaccccatgtccacagcagagcaccctccccactctacagtgttgagtttagtgaggaaccttttggtgtgatagttaggagacagttggatggtagggtgctgttgaacacaactgtggcacccctgttctttgcagaccaattccttcagttgtccacctccctgccttcacagtatatcacaggcctggcagagcacctcagtcccttgatgctctcaacctcttggactagaatcaccctctggaacagggaccttgcacccacacctggtgcaaacctctatgggtctcaccctttttacttggcactggaagatggagggtctgcacatggggtgttcttactaaattcaaatgccatggatgtggtcctgcagccaagccctgcccttagctggaggagcacaggtgggatattggatgtctacattttcctgggcccagagccaaagtcagtggtgcaacagtacctggatgttgttggatatccctttatgcctccatactggggcctgggcttccacctgtgcaggtggggctacagttccacagctataaccagacaggtggtggagaacatgacaagagcccacttcccactggatgtccaatggaatgatctggattatatggattccaggagggacttcacatttaataaggatggcttcagggactttccagccatggtgcaggagctgcatcagggaggcaggagatatatgatgatagtggatcctgccatcagcagcagtggccctgcagggtcatacaggccctatgatgagggtctgaggaggggagtttttataaccaatgagacaggccaacccctgattgggaaagtatggccaggatccactgcttttccagacttcaccaaccccacagccttagcctggtgggaggacatggtggctgagttccatgaccaggttccctttgatggcatgtggattgatatgaatgaacctagtaactttataaggggctctgaagatggctgccccaataatgaactggagaatccaccctatgtgcctggggtggttggggggactctccaggcagccaccatatgtgcatcctcacatcagtttctctccacacactacaaccttcataacctctatggccttacagaagccatagcatcccatagggcactggttaaggctagggggacaaggccatttgtgatctccaggagtacttttgctggccatggcaggtatgctggccattggacaggggatgtgtggtcatcctgggagcagctggcctccagtgttccagaaatactgcagtttaatcttttgggggttcctctggttggggcagatgtatgtggctttctgggcaacacctcagaagaactgtgtgttaggtggacccagctaggtgccttctaccccttcatgaggaatcacaatagcctattaagtctgccacaggagccatattctttcagtgagccagcccaacaggctatgaggaaagccctcaccctgaggtatgcactcctcccccacctttacacattattccaccaggcccatgtggcaggagagacagtggccaggcccctcttccttgaattccccaaagattctagcacctggactgtggaccatcagctcctgtggggggaggcactgctcatcacaccagtgttacaggcagggaaggctgaagtgactggctattttccattgggcacatggtatgacctgcagactgtgccagtagaagcccttggcagcctcccacccccacctgcagctccaagggaaccagccatccacagtgaggggcaatgggtaacactgccagctcccctggacaccatcaatgtccaccttagggctgggtacattattcccttgcagggccctggcttaacaaccacagagtctagacaacagcctatggctctggctgtggccctgaccaagggtggagaggccaggggggagttgttctgggatgatggagaaagcctggaagtgctagagaggggggcctacacacaggtcatttttctggctaggaataatacaattgtgaatgaacttgtaagggtgacaagtgagggagctggcctacagctgcagaaggtgactgtcctgggagtggccacagcacctcagcaagtcctctctaatggtgtccctgtctccaatttcacttacagcccagacaccaaagtcctggacatttgtgtcagcctgttgatgggagagcagtttcttgtctcctggtgt

SEQ ID NO: 206 - DNA, 2649 bp, synthetic construct
  misc_feature 1..2649: note = Synthetic
  source 1..2649: mol_type = other DNA
gcacaccctgggagacccagggcagtacctacccagtgtgatgttcctcccaacagtagatttgactgtgctccagacaaggccatcacacaggaacaatgtgaggccagaggttgctgctacatccctgctaagcaagggctccagggggcccagatggggcagccttggtgcttcttcccacccagctacccctcctacaaactggagaacctgagctcctctgagatgggctacactgccaccctgactagaacaacacctacctttttccctaaggacatcctgactctgaggttagatgtgatgatggaaactgaaaacaggctgcacttcaccatcaaggaccctgccaacaggagatatgaagttcctctggagacacctcatgttcacagcagagccccttcacccctgtattctgtggaattctctgaagaaccatttggagttatagtgagaagacaactggatggcagagtgctcctgaacacaacagtggcccctctgttctttgctgaccagtttctgcagctgagcactagcctgccttcccagtatatcactggcctggctgagcaccttagccctctgatgctcagcacatcttggactagaataacactatggaacagagacctggctccaaccccaggtgctaatctgtatggcagtcatcctttctacctggctctggaggatggagggtctgcccatggtgtgttcctgctgaactcaaatgcaatggatgttgtgttacagcctagccctgcattgagctggagaagtacaggtggaattctggatgtctacatattcttggggcctgagcctaagtctgtagtgcaacagtacctggatgttgttggctacccatttatgcctccctactggggcctaggattccacctgtgcagatggggctactccagtactgccatcaccagacaggtggttgagaacatgaccagggcccactttcctttagatgtgcagtggaatgatctggactacatggatagcagaagggacttcaccttcaacaaggatggttttagagacttccctgccatggtccaggagttgcaccaggggggcagaagatacatgatgatagtagacccagctatcagcagttcaggcccagcagggagctacaggccctatgatgagggcctgagaagaggtgtcttcatcactaatgagacaggccagccactgattggcaaagtgtggcctggctcaactgctttccctgatttcacaaaccctacagccttagcatggtgggaggatatggtggctgaattccatgaccaggtgccatttgatggcatgtggattgacatgaatgagccaagcaacttcatcagaggctctgaggatggctgccccaacaatgaactggaaaaccctccctatgtcccaggagtggtgggaggaaccctgcaggcagctacaatctgtgcctcttcccaccagttcctaagcacccactacaacctccataacctgtatgggttgacagaggccatagcctcccacagagccctggtcaaggctagaggcactaggccatttgtcatctctagatctacctttgctggccatggcaggtatgcaggccactggacaggtgatgtgtggagcagctgggaacaacttgccagcagtgtacctgagatcctccaatttaacctgctgggtgttcccctagtgggagctgatgtatgtgggttcctgggcaatacatcagaagagctctgtgtaaggtggacccagctaggggccttttacccattcatgagaaaccacaactctctcctgagccttccacaagaaccttactctttctctgagcctgctcagcaagccatgaggaaagcactgacattaagatatgcactgctgcctcacctttacaccctgttccaccaggcacatgtggcaggagaaacagtagccagacccctgttcttagagtttcccaaggactcttcaacctggactgtggaccaccagctcctatggggagaggccctgttaatcacccctgtgctgcaggctggtaaggctgaagttacaggctactttcccttaggcacatggtatgatttgcagacagtccctgtggaggccctgggatctcttcctcctcccccagctgctcctagggagcctgcaatccactctgagggacagtgggtaaccctcccagctccactggacaccatcaatgtacaccttagggctggatacattatccccctgcaaggccctggcctgaccacaacagagagcaggcagcagcctatggccctagctgttgcccttaccaagggaggggaagccagaggagagctcttctgggatgatggagagagccttgaagtgcttgaaaggggggcctacacacaagtgatcttcctggccagaaacaacactattgtgaatgagttggtgagagtcacaagtgaaggggctggtcttcaactccagaaagtgactgtgttaggagttgcaacagcaccacagcaggttctctctaatggggtaccagtgtctaacttcacatacagccctgacaccaaggtgctggacatctgtgtgtctttattgatgggtgaacagttcctggtgtcttggtgc

SEQ ID NO: 207 - DNA, 2649 bp, synthetic construct
  misc_feature 1..2649: note = Synthetic
  source 1..2649: mol_type = other DNA
gcacaccctggcaggcccagagcagtgcccacacagtgtgatgtcccaccaaatagcaggtttgattgtgcccctgacaaggctattacccaggaacagtgtgaagccagaggctgttgctacatccctgcaaaacaggggttgcagggagcacagatggggcagccctggtgcttcttcccaccatcttacccaagctataagttagaaaatctgtcatcctctgaaatgggctacactgccaccttgacaaggaccacccccacattcttccccaaagacatcctgacccttaggctggatgtgatgatggagactgagaacaggctccactttactatcaaagatccagctaacaggaggtatgaggtgcccttggagactcctcatgtccattcaagggcaccttccccactctactcagtggagttttcagaggagccctttggggttattgtgaggagacagctggatggcagagtgctgctgaacactactgtggcccctctgttctttgctgaccagttccttcagctgtcaacttctctgccatcacagtatatcacaggcctagctgagcacctcagtcccctgatgctcagcaccagctggacaagaattactctttggaacagagaccttgcacccactccaggtgctaatctctatgggtctcaccctttctacctggccctagaggatgggggctcagcacatggggtgttcttgctaaatagcaatgccatggatgtggtcttacagccttctcctgcccttagctggaggtctacaggtggaatactggatgtctacatctttctgggcccagagcccaagtctgttgtgcagcaatacctggatgttgtaggatatccctttatgccaccatattggggactgggcttccatttatgcaggtggggctactcctccactgctattaccaggcaagtggttgaaaacatgacaagggcccactttcccctggatgtacagtggaatgatcttgattacatggactccaggagggactttacatttaataaagatggcttcagggatttccctgccatggtgcaggagctgcaccagggaggcaggaggtacatgatgatagtggatcctgccatcagcagctcaggccctgctgggtcatataggccttatgatgaaggtcttaggaggggggtttttattaccaatgaaactggccaaccacttattggcaaggtatggcctggttcaactgccttccctgacttcaccaaccccacagccctggcctggtgggaggatatggtggctgaatttcatgaccaggttccttttgatggcatgtggattgatatgaatgagccttccaactttatcaggggctctgaagatggctgccccaataatgagctggagaacccaccctatgttcctggggtggttgggggtaccctccaggctgccactatctgtgcctccagccatcagtttctctccacacactacaacttgcacaacctctatggcctgactgaagccattgcctctcatagggctttggttaaggctagggggacaagaccatttgtgatctccaggtcaacttttgctggccatggcaggtatgctggccattggactggtgatgtgtggagctcctgggagcaactagcttcatcagtgccagaaatcctgcagtttaatctgctaggggttcctctggttggtgctgatgtctgtggctttttgggcaacacctcagaggaactatgtgtgaggtggacccagctgggagccttctaccccttcatgaggaaccataacagcctgctcagtctgccccaggagccttactcattctcagagcctgcccagcaggctatgaggaaggccctcaccctgaggtatgcactcctcccccacctctacacactgttccaccaagcccatgtagctggggaaactgttgccaggcccctctttctggaattccccaaggactctagcacctggactgtggatcatcaactcctttggggggaagcccttctcatcacaccagtgctccaggctgggaaagctgaagtgactggctatttccccttgggcacatggtatgacctgcagactgtgccagtagaggcccttggctctttaccacccccacctgcagctccaagggaaccagcaatccactctgagggtcagtgggtgactttgcctgcccccttagacacaataaatgtccacctcagagctgggtacatcattcccctgcagggtcctggcctcacaaccacagagtccaggcaacagcccatggctctggctgtggccctgacaaagggtggggaggccaggggggagcttttctgggatgatggagagagcctggaagtgctggagaggggggcctacacacaggtcatattcctggctaggaataacactatagtgaatgaattggtaagggtgaccagtgagggagctggcttgcagctgcagaaggtgactgtcctgggggtggccactgcaccccagcaggtcctttccaatggtgtccctgtctccaacttcacttacagccctgacaccaaggtcttggacatttgtgtttcattattgatgggagagcagtttctagtgagctggtgt

SEQ ID NO: 208 - DNA, 2649 bp, synthetic construct
  misc_feature 1..2649: note = Synthetic
  source 1..2649: mol_type = other DNA
gcccaccctggcaggcctagagctgtgcctacacaatgtgatgtgccacctaacagcagatttgactgtgcacctgacaaggccataacccaggaacagtgtgaggctagagggtgctgctacatccctgctaagcagggactgcaaggagctcagatgggtcagccctggtgcttctttcccccatcctaccctagttacaaactagaaaatctgagcagttctgagatgggctacacagccaccctgactagaaccactccaaccttcttcccaaaggacatcttaactctcagactggatgtaatgatggaaactgagaatagattgcacttcactatcaaagacccagccaacagaagatatgaagttcctctagaaacacctcatgtgcactctagagccccttcccctctgtacagtgtagagttctctgaagagccttttggggtgattgttagaaggcagttggatgggagggtgctgttgaacaccacagtggcccccctgttctttgctgaccagttccttcagctgagtacttctctcccaagtcagtatatcacaggtctggctgagcacctgtcccctctcatgctgtctaccagctggacaagaataaccctatggaacagagacctggcaccaacccctggagcaaacttgtatggcagccaccccttctaccttgccctggaggatggtggcagtgcacatggggtgttcctcctcaactccaatgccatggatgtggttctgcaaccctctcctgccctcagctggagaagcacaggaggcattctagatgtctacatcttcctgggccctgaaccaaagtctgtggtccaacaatacctggatgttgtgggatacccctttatgcccccttactggggattaggcttccacctgtgcagatggggttactcaagcacagcaattaccagacaggtggttgagaacatgaccagggctcacttccctttagatgtgcagtggaatgacctggactacatggacagcagaagggactttaccttcaacaaagatggattcagggacttccctgccatggtacaggagctacaccaaggaggcagaagatacatgatgattgttgacccagcaatttcttcctctggcccagcaggcagctacagaccctatgatgagggcctgagaagaggggtgttcatcacaaatgagacaggccaacctctgataggcaaagtgtggcctgggtccactgccttcccagacttcacaaaccccactgcactggcatggtgggaagacatggtggctgagttccatgaccaggtgccttttgatgggatgtggattgatatgaatgagccctctaactttatcagaggaagtgaggatggctgccccaacaatgaacttgagaaccctccttatgttcctggagtggtaggaggcactttgcaggcagccaccatctgtgccagctcacaccagttcctgtccactcactacaacctgcacaacctatatggacttacagaggccatagcttctcacagagccttagtgaaggccagaggcactaggccttttgtcatcagcaggtcaacctttgcaggccatggcagatatgctggccactggactggggatgtttggagttcttgggaacaactggccagctcagtgccagagatcctgcagtttaacctgctgggggtgcctctggtgggagctgatgtatgtggtttcctgggtaacacctctgaggagctctgtgtaagatggacccagttgggagctttctaccctttcatgagaaaccacaactctctcctcagcttgccccaggagccctacagcttttctgaaccagcccagcaggctatgaggaaggcactgacactgagatatgctctactgcctcacctctacaccctattccaccaagcccatgtggcaggtgaaacagtggccaggcccctgttcttagagttccctaaggactcaagtacctggacagttgaccaccagctgttgtggggtgaggccctgctcatcaccccagtactccaggctggaaaggcagaggttactggctacttccctctgggcacctggtatgacctgcagacagtccctgtggaggctctggggtcactgcctccccctccagctgctccaagagaacctgccatccacagtgaaggccaatgggtaaccttgcctgcccctttagacacaatcaatgtgcacttgagagcaggctatatcataccactgcaaggaccaggcctaacaactacagagagcagacagcaacctatggctctggcagttgctttgactaagggtggtgaagcaagaggggaactgttctgggatgatggagaatctctggaagtgttagagagaggagcatacactcaggtgatcttcttagccaggaacaacaccattgtgaatgaactggttagggtgacaagtgaaggtgcaggactgcagctgcagaaggtgactgtcttaggtgtagccacagctccacaacaagtgctgtccaatggtgttcctgtcagcaacttcacctactctcctgacaccaaggttctggacatctgtgtgagcctccttatgggtgagcagtttctagtctcttggtgc

SEQ ID NO: 209 - DNA, 2649 bp, synthetic construct
  misc_feature 1..2649: note = Synthetic
  source 1..2649: mol_type = other DNA
gcacatccaggcaggcccagagcagtgcccacacaatgtgatgtcccccctaattcaaggtttgattgtgcccctgacaaggccatcactcaggaacagtgtgaagctaggggctgttgctatatccctgcaaagcagggtctgcagggagctcagatggggcagccctggtgcttctttccacccagctaccccagctacaaactggagaatctgagctcatctgaaatgggctacactgccaccctgaccaggacaacccccaccttcttccccaaagacatattgactcttagacttgatgtgatgatggagactgaaaacaggttacatttcactattaaagatccagctaacaggaggtatgaggttcccttggagactccacatgttcacagcagggcaccttccccactttactctgtggagttcagtgaagagccctttggtgtgattgtgaggaggcagctggatggcagggtactgttgaacactactgtggctcccttgttctttgctgaccagttccttcagctgtccaccagcctgccctcccagtatatcacaggcttagctgagcacctcagtcccctgatgttgagcacatcatggaccaggattaccctttggaacagggatcttgctcccactcctggtgctaacctctatgggtctcaccctttctatctggctttggaggatggtgggagtgcacatggggtgttcctgctaaatagcaatgccatggatgtggtcctacagcctagccctgccctttcttggaggtctacaggtgggatattagatgtttacatttttctgggaccagaacctaagtcagtagtgcagcagtacctagatgttgtgggatatccttttatgcctccatactggggattaggctttcatctgtgcaggtggggctattcctcaactgctattaccaggcaggtggtggagaacatgaccagagcccattttcccttagatgtccagtggaatgatctggactatatggactccaggagggactttacattcaacaaggatggcttcagggattttcctgccatggtgcaggaactccaccagggtggtaggaggtatatgatgatagttgatcctgctatcagcagcagtggccctgctgggagctacaggccatatgatgagggtctgaggaggggtgttttcataacaaatgagactggccagcctcttattgggaaagtatggcctggttccactgccttccctgatttcaccaatcctacagccctggcctggtgggaggacatggtggctgagttccatgaccaggtgccttttgatggcatgtggattgacatgaatgaaccttccaacttcatcaggggctctgaggatggctgccctaacaatgagctggagaacccaccctatgtgcctggggtggttggggggacactccaggctgctactatatgtgcctccagccaccagtttctctctacacactacaatctgcacaacctctatggcctgactgaagcaattgcctcccacagggctctggtgaaggctagggggacaaggccatttgtgatatccagatccacctttgctggacatggcaggtatgcaggccactggactggggatgtgtggagctcctgggagcagttggcctctagtgtgccagaaattctgcagtttaatctgctgggggttcctctagtaggggctgatgtctgtggctttcttggcaacacctcagaggaactgtgtgtgaggtggactcagctgggggctttctacccctttatgagaaaccacaattcactgctcagtctgccccaggagccatattctttcagtgagcctgcccaacaagccatgaggaaggccctcaccctgaggtatgcacttctcccacacctctatacactgtttcatcaggcccatgttgctggggaaactgttgcaaggcccctcttcctggagttccccaaagactctagcacctggactgtggatcatcaactcctttggggtgaggccttactcatcaccccagtgctccaagctgggaaggcagaagtgactggctacttccccttgggcacatggtatgatttgcagactgtgccagtagaagcccttggcagccttccacccccacctgcagctcctagggagccagccatccatagtgagggtcagtgggtgactctgccagcccccctggacactatcaatgtccacctcagggctgggtacattatccctctgcaaggccctggcctcacaaccacagaatccagacagcaacccatggccctagctgttgccttgaccaagggtggggaagccaggggtgagctcttttgggatgatggagagagcctggaagtgctggagaggggggcctacacacaggtcattttcctagccagaaataacactattgtgaatgaattggtaagggtgaccagtgagggagctggcctgcagctgcagaaggtgactgtccttggtgtggctactgctccacagcaggtcctctccaatggtgtccctgtctcaaattttacctattctccagacaccaaggtcttggacatctgtgtatccctgttgatgggagagcagtttttggttagctggtgt

SEQ ID NO: 210 - DNA, 2649 bp, synthetic construct
  misc_feature 1..2649: note = Synthetic
  source 1..2649: mol_type = other DNA
gcacaccctggcagacctagagctgttcccacacagtgtgatgtccctcctaacagcagatttgactgtgccccagacaaagctatcacccaggagcagtgtgaggctaggggctgctgctacatccctgccaagcagggcctgcaaggagcccaaatgggccagccctggtgtttctttcccccctcttacccatcctacaagctagaaaacctcagctcatctgagatgggatacacagctaccctgaccagaaccacccccaccttcttccctaaggatatactgacattgagactggatgtgatgatggaaactgagaacagactccacttcaccatcaaggatcctgctaacagaaggtatgaggtgcccctggagacacctcatgtccacagtagagcccctagcccactatactctgtggagttctcagaagagccttttggtgtgatagttagaagacaactggatgggagagtgttgctaaatactactgttgctcccttattttttgctgaccagttcttgcagttatccacctctctcccctctcagtacatcacagggctggctgagcacctttcccctctgatgttgtccacttcttggacaagaatcaccttgtggaatagggaccttgccccaactcctggtgccaacctgtatggcagccaccccttctacctggccctggaggatggaggctctgcccatggagtgttcctgctgaactccaatgccatggatgttgtgctgcagccatctcctgccctgtcctggaggagtacaggaggcatcctggatgtgtatatctttctgggacctgagcccaagtctgtggttcagcagtacctggatgtagtgggctaccccttcatgccaccttactggggtctgggcttccacctctgcaggtggggttacagtagcactgctatcactagacaagtggtggagaacatgaccagggcccacttccctctagatgtgcagtggaatgacttagactatatggatagcagaagggacttcacattcaacaaggatggcttcagggacttccctgcaatggtacaggagttacaccaggggggaagaagatacatgatgattgtggaccctgccattagctcttctggccctgcagggagctacaggccttatgatgaagggctgagaaggggtgtgttcattactaatgaaacaggccagcctttaattggcaaggtctggcctggcagtacagccttcccagacttcaccaaccctactgctctagcttggtgggaggacatggtggctgaatttcatgatcaagtgccttttgatggcatgtggattgacatgaatgagcctagcaacttcattagaggcagtgaagatggttgccctaacaatgagctggaaaatccaccctatgttccaggtgtggtaggaggcaccctacaagcagccaccatttgtgcctctagccaccagttcctgagcacccactataacttacataacctgtatggcctcacagaagccattgccagccacagagccttagtgaaagcaaggggcacaagaccctttgtaatctcaaggtccacctttgctggccatggcagatatgcaggccactggacaggtgatgtgtggagctcctgggagcagttagcctcttctgtgccagaaatcctgcagttcaatctcctgggagtgcctctggtgggagctgatgtttgtggctttctgggtaacacaagtgaagagctgtgtgtcaggtggacacagctgggagcattttaccccttcatgaggaaccacaactctttgctcagtctgcctcaagaaccctactccttctctgagcctgcccagcaggctatgagaaaggccctcacccttagatatgctctcctgcctcacctgtacaccctgttccaccaggcccatgttgctggggagactgtggctagaccacttttcttagagttccctaaggacagcagtacctggacagtagaccaccaactgttatggggggaggccctgctcattacccctgttctccaggcaggcaaggcagaagtgacagggtacttccctctgggcacctggtatgacctacagacagttcctgtggaggcccttggcagtctgccaccccctcctgctgcacctagagaacctgcaatccactcagaaggacaatgggttaccctccctgcccctctagacaccatcaatgtgcatttaagagcaggctacatcatacccttgcagggccctggcctgaccaccacagaatctagacagcagcccatggcactggctgttgccctaaccaagggaggagaggccagaggagagctgttctgggatgatggggagagtctggaggtcctggagagaggagcctacacccaggtgatctttcttgctagaaacaatactatagtgaatgagctagtgagagtgactagtgagggtgctggcctccagttgcagaaggtaacagtattaggagtggctacagcccctcagcaggtactgtccaatggtgtgcctgtttccaatttcacttactcccctgacactaaggtactggatatctgtgtgtccctgctgatgggagaacagtttctggtcagctggtgc

SEQ ID NO: 211 - DNA, 2649 bp, synthetic construct
  misc_feature 1..2649: note = Synthetic
  source 1..2649: mol_type = other DNA
gcacatcctggaaggcccagagcagtgcccacacagtgtgatgtcccccccaattctagatttgattgtgcccctgataaggctatcacccaagaacagtgtgaggccagaggctgttgctacatacctgcaaagcaagggcttcagggagctcagatggggcaaccctggtgctttttcccacctagctatcccagctacaagctggaaaacttgagctcctctgaaatgggctacactgccactctgaccaggaccacccccaccttcttccccaaagacatactgactcttagactagatgttatgatggagactgaaaataggctccattttacaatcaaagatccagctaacaggaggtatgaggttcctttggagacccctcatgtccatagcagagcaccatcaccactctactctgtggagttttctgaggaaccctttggggtgattgtgaggaggcagctagatggcagggtgctgttaaatacaactgtggctcccctgttctttgctgaccagtttcttcaactgtccacctccctgccctcccagtatattacaggcctggctgagcacctcagtcccttgatgctcagcaccagctggaccaggataaccttatggaacagggaccttgctccaactcctggtgcaaacctctatgggtctcatcctttctatctagctcttgaggatggggggtctgcacatggggtgttcctgctaaactctaatgcaatggatgttgtcctgcagccaagccctgccctttcttggaggtccacaggtgggatcctggatgtctacatcttcttgggcccagaacccaagtctgtggtgcagcagtaccttgatgttgtgggatacccttttatgcccccatactggggcctgggctttcatctgtgcaggtggggctactcctccactgctatcaccaggcaggtggtggagaacatgaccagggcccacttccctctggatgtccagtggaatgatctggattatatggattccaggagggatttcactttcaacaaagatggctttagggacttccctgccatggtgcaggagctgcaccagggtggcaggaggtatatgatgattgtggatcctgccataagcagctcaggccctgctgggagctacaggccatatgatgaaggtttgaggaggggggttttcataaccaatgagactggccagcctctgattgggaaggtatggcctgggtccactgcattccctgacttcaccaatcccacagctctggcctggtgggaggacatggtagctgagttccatgaccaggtgccctttgatggaatgtggattgacatgaatgaaccttccaacttcatcaggggctctgaggatggctgccccaacaatgagctggaaaacccaccctatgtgcctggggtggttggtgggaccttgcaagctgccaccatctgtgcctcctctcaccagtttctctccacacattacaatctgcacaatctctatggcctgactgaagccattgcttcccacagagctctggtgaaggctaggggcacaaggccatttgttatatcaaggtccacatttgctggccatggcaggtatgctggccactggacaggggatgtatggagctcctgggagcagcttgcatcctctgtgccagaaattctgcagtttaacttattaggggtgcctctggttggtgctgatgtctgtggcttccttggcaacacatcagaggagctttgtgtgaggtggactcagttaggggctttctacccattcatgaggaatcacaactcactcctcagtctaccccaggagccctattcattctctgagccagcccagcaggccatgaggaaggctctcaccctgaggtatgcactcctccctcatttgtacacactgtttcaccaggcccatgttgctggggaaactgttgccaggcccctcttcctggaattccccaaagactctagcacttggactgtggatcatcagctcctgtggggggaagccctgctcattactccagtgctacaggctggtaaggctgaagtgactggctacttccctttgggcacatggtatgacctgcagacagtgccagtagaggcccttggcagcctcccacctccacctgcagctcccagggagccagccatccactctgaaggacagtgggtgactctgcctgcccccttagacactattaatgttcacctcagggctggctacatcattcccctgcaaggccctggcctcacaaccacagaatccaggcagcaacccatggctttggctgtggccctgactaagggtggggaagccaggggggagcttttttgggatgatggagagagcctagaagtgttggagaggggggcctatacacaggtcatctttttggccaggaataatacaattgtgaatgagctggtaagggtgaccagtgaaggagctggactgcagctgcagaaggtgactgtacttggagtggctactgctccacagcaggttctatcaaatggtgtccctgtttccaatttcacctacagcccagacacaaaggtcctggacatttgtgtctccctgttgatgggagagcaatttttggtaagctggtgt

SEQ ID NO: 212 - DNA, 2649 bp, synthetic construct
  misc_feature 1..2649: note = Synthetic
  source 1..2649: mol_type = other DNA
gcccaccctggcagacctagagctgtgccaactcagtgtgatgtccctcctaactctagatttgattgtgctccagacaaggccatcacccaggagcagtgtgaagctaggggctgctgctacatccctgccaagcaaggtctgcagggtgcccagatgggtcagccttggtgcttcttcccaccttcctacccctcatacaagctggaaaatctgagctcttctgagatgggctacacagccaccttgacaaggaccactccaacctttttccctaaagacatcctgacactgagacttgatgtgatgatggagactgagaacagactgcacttcactatcaaagacccagcaaacagaaggtatgaagtgcctctggagaccccccatgtgcacagcagagctccttcacctctgtactcagtggagttcagtgaggagccatttggggtgattgtgaggagacagctggatggcagggtactgctgaacaccacagtggcacccttgttctttgcagaccaattcctccagctcagtacaagcctgccttctcagtacattacaggactggcagagcacttaagcccattgatgttatccaccagctggaccagaattaccttgtggaacagggacctggcccctaccccaggagctaacctctatggcagccacccattttacctagccctggaggatgggggatcagcacatggggttttcctgctaaacagcaatgccatggatgtggtcctgcagccttctcctgccctgagctggaggtccacaggagggatccttgatgtgtacatctttctgggccctgagcctaagagtgtggtgcaacagtacttggatgtggtggggtaccctttcatgcctccctactgggggttgggcttccacttgtgcagatggggatacagctcaacagccatcaccaggcaggtggttgagaacatgactagagcccactttccactagatgtgcagtggaatgacctggactacatggatagtagaagagacttcaccttcaataaggatggcttcagagatttccctgccatggtgcaggaactgcaccagggaggcagaagatacatgatgatagtggaccctgctatcagcagctctggccctgcaggtagctacagaccttatgatgagggcctgaggaggggagtgttcatcaccaatgagacaggccagcccctcattggcaaggtctggccaggcagcacagctttccctgacttcaccaaccccacagccctggcctggtgggaggacatggtggctgagttccatgaccaggtaccctttgatgggatgtggattgacatgaatgaaccctctaacttcatcaggggttctgaagatggctgccctaacaatgagctggagaaccccccttatgtgccaggagttgtgggaggcacccttcaggctgccaccatctgtgccagttcccaccagttcctaagcacccactacaacctgcacaacctgtatggtctcactgaagccatagcctctcacagagctctagtgaaggccagagggaccaggccttttgttatctccaggagtacctttgctggccatggtagatatgcaggccactggacaggagatgtgtggtcctcctgggagcaattagccagcagtgtgccagagatcctgcagttcaacctgctgggggttcctttagttggggcagatgtgtgtggcttcttgggcaacacatctgaagagctgtgtgtgagatggacccagctgggagccttctacccattcatgagaaaccataactcactgctgagcctccctcaggagccctacagcttctcagaacctgcccagcaggctatgaggaaggccctgacactcaggtatgccctgttacctcacctgtacaccctgttccaccaggctcatgtagctggggagactgtggccagaccccttttccttgagtttcctaaggacagctccacctggactgtggaccaccagttgctgtggggagaggccctgctgatcacccctgttctgcaggctggcaaagctgaggtgacaggctacttccccctgggaacctggtatgacctacaaactgtgccagtggaagcactgggctcactacctccacctccagctgcccccagagaacctgctattcactctgaagggcagtgggtgacactgcctgccccattagacaccatcaatgtacacttaagggctggctacatcattccactgcaggggccaggcctgaccaccactgagtccaggcagcagcccatggccctggcagtagccctaaccaagggaggtgaggccagaggagagctgttttgggatgatggtgaaagcctagaggtactagagagaggagcctacacccaggtcatcttcctggccagaaacaacacaatagtgaatgagctggtcagggtcacatctgagggggcaggcctgcagcttcagaaggtcactgtgttgggggtagccacagctccacagcaggtactttccaatggagtgccagtcagcaacttcacctacagtcctgacacaaaggttctggacatctgtgtgagcctgctgatgggagagcagttcttggtcagctggtgc

SEQ ID NO: 213 - protein, 925 aa, synthetic construct
  REGION 1..925: note = Synthetic
GHILLHDFLLVPRELSGSSPVLEETHPAHQQGASRPGPRDAQAHPGRPRAVPTQCDVPPNSRFDCAPDKAITQEQCEARGCCYIPAKQGLQGAQMGQPWCFFPPSYPSYKLENLSSSEMGYTATLTRTTPTFFPKDILTLRLDVMMETENRLHFTIKDPANRRYEVPLETPHVHSRAPSPLYSVEFSEEPFGVIVRRQLDGRVLLNTTVAPLFFADQFLQLSTSLPSQYITGLAEHLSPLMLSTSWTRITLWNRDLAPTPGANLYGSHPFYLALEDGGSAHGVFLLNSNAMDVVLQPSPALSWRSTGGILDVYIFLGPEPKSVVQQYLDVVGYPFMPPYWGLGFHLCRWGYSSTAITRQVVENMTRAHFPLDVQWNDLDYMDSRRDFTFNKDGFRDFPAMVQELHQGGRRYMMIVDPAISSSGPAGSYRPYDEGLRRGVFITNETGQPLIGKVWPGSTAFPDFTNPTALAWWEDMVAEFHDQVPFDGMWIDMNEPSNFIRGSEDGCPNNELENPPYVPGVVGGTLQAATICASSHQFLSTHYNLHNLYGLTEAIASHRALVKARGTRPFVISRSTFAGHGRYAGHWTGDVWSSWEQLASSVPEILQFNLLGVPLVGADVCGFLGNTSEELCVRWTQLGAFYPFMRNHNSLLSLPQEPYSFSEPAQQAMRKALTLRYALLPHLYTLFHQAHVAGETVARPLFLEFPKDSSTWTVDHQLLWGEALLITPVLQAGKAEVTGYFPLGTWYDLQTVPVEALGSLPPPPAAPREPAIHSEGQWVTLPAPLDTINVHLRAGYIIPLQGPGLTTTESRQQPMALAVALTKGGEARGELFWDDGESLEVLERGAYTQVIFLARNNTIVNELVRVTSEGAGLQLQKVTVLGVATAPQQVLSNGVPVSNFTYSPDTKVLDICVSLLMGEQFLVSWC

SEQ ID NO: 214 - protein, 917 aa, synthetic construct
  REGION 1..917: note = Synthetic
LLVPRELSGSSPVLEETHPAHQQGASRPGPRDAQAHPGRPRAVPTQCDVPPNSRFDCAPDKAITQEQCEARGCCYIPAKQGLQGAQMGQPWCFFPPSYPSYKLENLSSSEMGYTATLTRTTPTFFPKDILTLRLDVMMETENRLHFTIKDPANRRYEVPLETPHVHSRAPSPLYSVEFSEEPFGVIVRRQLDGRVLLNTTVAPLFFADQFLQLSTSLPSQYITGLAEHLSPLMLSTSWTRITLWNRDLAPTPGANLYGSHPFYLALEDGGSAHGVFLLNSNAMDVVLQPSPALSWRSTGGILDVYIFLGPEPKSVVQQYLDVVGYPFMPPYWGLGFHLCRWGYSSTAITRQVVENMTRAHFPLDVQWNDLDYMDSRRDFTFNKDGFRDFPAMVQELHQGGRRYMMIVDPAISSSGPAGSYRPYDEGLRRGVFITNETGQPLIGKVWPGSTAFPDFTNPTALAWWEDMVAEFHDQVPFDGMWIDMNEPSNFIRGSEDGCPNNELENPPYVPGVVGGTLQAATICASSHQFLSTHYNLHNLYGLTEAIASHRALVKARGTRPFVISRSTFAGHGRYAGHWTGDVWSSWEQLASSVPEILQFNLLGVPLVGADVCGFLGNTSEELCVRWTQLGAFYPFMRNHNSLLSLPQEPYSFSEPAQQAMRKALTLRYALLPHLYTLFHQAHVAGETVARPLFLEFPKDSSTWTVDHQLLWGEALLITPVLQAGKAEVTGYFPLGTWYDLQTVPVEALGSLPPPPAAPREPAIHSEGQWVTLPAPLDTINVHLRAGYIIPLQGPGLTTTESRQQPMALAVALTKGGEARGELFWDDGESLEVLERGAYTQVIFLARNNTIVNELVRVTSEGAGLQLQKVTVLGVATAPQQVLSNGVPVSNFTYSPDTKVLDICVSLLMGEQFLVSWC

SEQ ID NO: 215 - protein, 883 aa, synthetic construct; identical to SEQ ID NO: 173
  REGION 1..883: note = Synthetic

SEQ ID NO: 216 - DNA, 363 bp, synthetic construct
  misc_feature 1..363: note = Synthetic
  source 1..363: mol_type = other DNA
gaggtgcagctggtggagtctgggggaggcttggtacagcctggggggtccctgagactctcctgtgcagcctctggattcgcctttagcagctatgccatgacctgggtccgacaggctccagggaaggggctggagtgggtctcagttatcagtggtactggtggtagtacatactacgcagactccgtgaagggccggttcaccatctccagagacaattccaagaacacgctgtatctacaaatgaacagcctgagagccgaggacacggccgtatattactgtgcgaaagggggagcagctcgtagaatggaatacttccagtactggggccagggcaccctggtcaccgtctcctca

SEQ ID NO: 217 - protein, 121 aa, synthetic construct
  REGION 1..121: note = Synthetic
EVQLVESGGGLVQPGGSLRLSCAASGFAFSSYAMTWVRQAPGKGLEWVSVISGTGGSTYYADSVKGRFTISRDNSKNTLYLQMNSLRAEDTAVYYCAKGGAARRMEYFQYWGQGTLVTVSS

SEQ ID NO: 218 - protein, 8 aa, synthetic construct
  REGION 1..8: note = Synthetic
GFAFSSYA

SEQ ID NO: 219 - protein, 8 aa, synthetic construct
  REGION 1..8: note = Synthetic
ISGTGGST

SEQ ID NO: 220 - protein, 14 aa, synthetic construct
  REGION 1..14: note = Synthetic
AKGGAARRMEYFQY

SEQ ID NO: 221 - DNA, 321 bp, synthetic construct
  misc_feature 1..321: note = Synthetic
  source 1..321: mol_type = other DNA
gacatccagatgacccagtctccatcctccctgtctgcatctgtaggagacagagtcaccatcacttgccgggcgagtcagggcattagcaattatttagcctggtatcagcagaaaccagggaaagttcctaacctccttatctatgctgcatccactttgcaatcaggggtcccatctcgattcagtggcagtggatctgggacagatttcactctcaccatcagcagcctgcagcctgaagatgttgcaacttattactgtcaaaagtataacagtgcccctctcactttcggcggagggaccaaggtggagatcaaa

SEQ ID NO: 222 - protein, 107 aa, synthetic construct
  REGION 1..107: note = Synthetic
DIQMTQSPSSLSASVGDRVTITCRASQGISNYLAWYQQKPGKVPNLLIYAASTLQSGVPSRFSGSGSGTDFTLTISSLQPEDVATYYCQKYNSAPLTFGGGTKVEIK

SEQ ID NO: 223 - protein, 6 aa, synthetic construct
  REGION 1..6: note = Synthetic
QGISNY

SEQ ID NO: 224 - skipped

SEQ ID NO: 225 - protein, 9 aa, synthetic construct
  REGION 1..9: note = Synthetic
QKYNSAPLT

SEQ ID NO: 226 - DNA, 363 bp, synthetic construct
  misc_feature 1..363: note = Synthetic
  source 1..363: mol_type = other DNA
gaggtgcagctggtggagtctgggggaggcttggtacagcctggggggtccctgagactctcctgtgcagcctctggattcacctttaacagctatgccatgacctgggtccgccaggctccagggaaggggctggagtgggtctcatttattggtggtagtactggtaacacatactacgcaggctccgtgaagggccggttcaccatctccagcgacaattccaagaagacgctgtatctgcaaatgaacagcctgagagccgaggacacggccgtatattactgtgcgaaagggggagcagctcgtagaatggaatacttccagcactggggccagggcaccctggtcaccgtctcctca

SEQ ID NO: 227 - protein, 121 aa, synthetic construct
  REGION 1..121: note = Synthetic
EVQLVESGGGLVQPGGSLRLSCAASGFTFNSYAMTWVRQAPGKGLEWVSFIGGSTGNTYYAGSVKGRFTISSDNSKKTLYLQMNSLRAEDTAVYYCAKGGAARRMEYFQHWGQGTLVTVSS

SEQ ID NO: 228 - protein, 8 aa, synthetic construct
  REGION 1..8: note = Synthetic
GFTFNSYA

SEQ ID NO: 229 - protein, 8 aa, synthetic construct
  REGION 1..8: note = Synthetic
IGGSTGNT

SEQ ID NO: 230 - protein, 14 aa, synthetic construct
  REGION 1..14: note = Synthetic
AKGGAARRMEYFQH

SEQ ID NO: 231 - DNA, 321 bp, synthetic construct
  misc_feature 1..321: note = Synthetic
  source 1..321: mol_type = other DNA
gacatccagatgacccagtctccatcctccctgtctgcatctataggagacagagtcaccatcacttgccgggcgagtcagggcattagcaattatttagcctggtatcaacagaaaccagggaaagttcctaagctcctgatctatgctgcatccactttgcaatcaggggtcccatctcggttcagtggcagtggatctgggacagatttcactctcaccatcagcagcctgcagcctgaagatgttgcaacttattactgtcaaaaccataacagtgtccctctcactttcggcggagggaccaaggtggagatcaaa

SEQ ID NO: 232 - protein, 107 aa, synthetic construct
  REGION 1..107: note = Synthetic
DIQMTQSPSSLSASIGDRVTITCRASQGISNYLAWYQQKPGKVPKLLIYAASTLQSGVPSRFSGSGSGTDFTLTISSLQPEDVATYYCQNHNSVPLTFGGGTKVEIK

SEQ ID NO: 233 - protein, 6 aa, synthetic construct
  REGION 1..6: note = Synthetic
QGISNY

SEQ ID NO: 234 - skipped

SEQ ID NO: 235 - protein, 9 aa, synthetic construct
  REGION 1..9: note = Synthetic
QNHNSVPLT

SEQ ID NO: 236 - DNA, 366 bp, synthetic construct
  misc_feature 1..366: note = Synthetic
  source 1..366: mol_type = other DNA
caggtgcagctggtggagtctgggggaggcgtggtccagcctgggaggtccctgagactctcctgtgcagcgtctggattcaccttcactacctatggcatgcactgggtccgccaggctccaggcaaggggctggagtgggtggctgttatatggtatgatggaagtaataaatattatggagactccgtgaagggccgattcaccatctccagagacaattccaagaacacactgtatctgcaaatgaacagcctgagagtcgacgacacggctgtttattactgtacgagaacccatggctataccaggtcgtcggacggttttgactactggggccagggaaccctggtcaccgtctcctca

SEQ ID NO: 237 - protein, 122 aa, synthetic construct
  REGION 1..122: note = Synthetic
QVQLVESGGGVVQPGRSLRLSCAASGFTFTTYGMHWVRQAPGKGLEWVAVIWYDGSNKYYGDSVKGRFTISRDNSKNTLYLQMNSLRVDDTAVYYCTRTHGYTRSSDGFDYWGQGTLVTVSS

SEQ ID NO: 238 - protein, 8 aa, synthetic construct
  REGION 1..8: note = Synthetic
GFTFTTYG

SEQ ID NO: 239 - protein, 8 aa, synthetic construct
  REGION 1..8: note = Synthetic
IWYDGSNK

SEQ ID NO: 240 - protein, 15 aa, synthetic construct
  REGION 1..15: note = Synthetic
TRTHGYTRSSDGFDY

SEQ ID NO: 241 - DNA, 321 bp, synthetic construct
  misc_feature 1..321: note = Synthetic
  source 1..321: mol_type = other DNA
gacatccagatgacccagtctccatcctccctgtctgcatctgtaggagacagagtcaccatcacttgccgggcaagtcagagcattagaaatgttttaggctggtttcagcagaaaccagggaaagcccctcagcgcctgatctatgctgcatccagtttgcaaagtggggtcccatcaaggttcagcggcagtggatctgggacagaattcactctcacaatcagcagcctacagcctgaagattttgcaacttattactgtctacagcataatttttacccgctcactttcggcggagggaccaaggtggagatcaaa

SEQ ID NO: 242 - protein, 107 aa, synthetic construct
  REGION 1..107: note = Synthetic
DIQMTQSPSSLSASVGDRVTITCRASQSIRNVLGWFQQKPGKAPQRLIYAASSLQSGVPSRFSGSGSGTEFTLTISSLQPEDFATYYCLQHNFYPLTFGGGTKVEIK

SEQ ID NO: 243 - protein, 6 aa, synthetic construct
  REGION 1..6: note = Synthetic
QSIRNV

SEQ ID NO: 244 - skipped

SEQ ID NO: 245 - protein, 9 aa, synthetic construct
  REGION 1..9: note = Synthetic
LQHNFYPLT

SEQ ID NO: 246 - DNA, 369 bp, synthetic construct
  misc_feature 1..369: note = Synthetic
  source 1..369: mol_type = other DNA
gaagtgcagctggtggagtctgggggaggcttggtacagcctggcaggtccctgagactctcctgtgcagcctctggattcacctttgatgataaagccatgcactgggtccggcaagttccagggaagggcctggaatggatctcaggtattagttggaatagtggtactataggctatgcggactctgtgaagggccgattcatcatctccagagacaacgccaagaactccctgtatctacaaatgaacagtctgagagctgaggacacggccttgtattactgcgcaaaagatggagataccagtggctggtactggtacggtttggacgtctggggccaagggaccacggtcaccgtctcctca

SEQ ID NO: 247 - protein, 123 aa, synthetic construct
  REGION 1..123: note = Synthetic
EVQLVESGGGLVQPGRSLRLSCAASGFTFDDKAMHWVRQVPGKGLEWISGISWNSGTIGYADSVKGRFIISRDNAKNSLYLQMNSLRAEDTALYYCAKDGDTSGWYWYGLDVWGQGTTVTVSS

SEQ ID NO: 248 - protein, 8 aa, synthetic construct
  REGION 1..8: note = Synthetic
GFTFDDKA

SEQ ID NO: 249 - protein, 8 aa, synthetic construct
  REGION 1..8: note = Synthetic
ISWNSGTI

SEQ ID NO: 250 - protein, 16 aa, synthetic construct
  REGION 1..16: note = Synthetic
AKDGDTSGWYWYGLDV

SEQ ID NO: 251 - DNA, 321 bp, synthetic construct
  misc_feature 1..321: note = Synthetic
  source 1..321: mol_type = other DNA
gaaattgtgttgacacagtctcctgccaccctgtctttgtctccaggggaaagagccaccctctcctgcagggccagtcagagtgttagcagctacttagcctggtaccaacagaaacctggccaggctcccaggctcctcatccatgatgtatccaacagggccactggcatcccagccaggttcagtggcagtgggtctgggacagacttcactctcaccatcagcagtctagagcctgaagattttgtagtttattactgtcagcagcgtagcgactggcccatcaccttcggccaagggacacgactggagattaaa

SEQ ID NO: 252 - protein, 107 aa, synthetic construct
  REGION 1..107: note = Synthetic
EIVLTQSPATLSLSPGERATLSCRASQSVSSYLAWYQQKPGQAPRLLIHDVSNRATGIPARFSGSGSGTDFTLTISSLEPEDFVVYYCQQRSDWPITFGQGTRLEIK

SEQ ID NO: 253 - protein, 6 aa, synthetic construct
  REGION 1..6: note = Synthetic
QSVSSY

SEQ ID NO: 254 - skipped

SEQ ID NO: 255 - protein, 9 aa, synthetic construct
  REGION 1..9: note = Synthetic
QQRSDWPIT

SEQ ID NO: 256 - DNA, 360 bp, synthetic construct
  misc_feature 1..360: note = Synthetic
  source 1..360: mol_type = other DNA
caggtgcagctggtggagtctgggggaggcgtggtccagcctgggaggtccctgagactctcctgtatagcctctggattcaccttcagtgtctatggcattcactgggtccgccaggctccaggcaaggggctggagtggatggcagtaatatcacatgatggaaatattaaacactatgcagactccgtgaagggccgattcaccatctccagagacaattccaagaacacgctgtatcttcaaattaacagcctgagaactgaggacacggctgtgtattactgtgcgaaagatacctggaactcccttgatacttttgatatctggggccaagggacaatggtcaccgtctcttca

SEQ ID NO: 257 - protein, 120 aa, synthetic construct
  REGION 1..120: note = Synthetic
QVQLVESGGGVVQPGRSLRLSCIASGFTFSVYGIHWVRQAPGKGLEWMAVISHDGNIKHYADSVKGRFTISRDNSKNTLYLQINSLRTEDTAVYYCAKDTWNSLDTFDIWGQGTMVTVSS

SEQ ID NO: 258 - protein, 8 aa, synthetic construct
  REGION 1..8: note = Synthetic
GFTFSVYG

SEQ ID NO: 259 - protein, 8 aa, synthetic construct
  REGION 1..8: note = Synthetic
ISHDGNIK

SEQ ID NO: 260 - protein, 13 aa, synthetic construct
  REGION 1..13: note = Synthetic
AKDTWNSLDTFDI

SEQ ID NO: 261 - DNA, 321 bp, synthetic construct
  misc_feature 1..321: note = Synthetic
  source 1..321: mol_type = other DNA
gacatccagttgacccagtctccatcctccctgtctgcatctgtaggagacagagtcaccatcacttgctgggccagtcagggcattagcagttatttagcctggtatcagcaaaaaccagggaaagcccctaagctcctgatctatgctgcatccactttgcaaagtggggtcccatcaaggttcagcggcagtggatctgggacagaattcactctcacaatcagcagcctgcagcctgaagattttgcaacttattactgtcaacagcttaatagttaccctctcactttcggcggagggaccaaggtggagatcaaa

SEQ ID NO: 262 - protein, 107 aa, synthetic construct
  REGION 1..107: note = Synthetic
DIQLTQSPSSLSASVGDRVTITCWASQGISSYLAWYQQKPGKAPKLLIYAASTLQSGVPSRFSGSGSGTEFTLTISSLQPEDFATYYCQQLNSYPLTFGGGTKVEIK

SEQ ID NO: 263 - protein, 6 aa, synthetic construct
  REGION 1..6: note = Synthetic
QGISSY

SEQ ID NO: 264 - skipped

SEQ ID NO: 265 - protein, 9 aa, synthetic construct
  REGION 1..9: note = Synthetic
QQLNSYPLT

SEQ ID NO: 266 - DNA, 360 bp, synthetic construct
  misc_feature 1..360: note = Synthetic
  source 1..360: mol_type = other DNA
caggtcaccttgagggagtctggtcccgcgctggtgaaaccctcacagaccctcacactgacctgcaccttctctggattctcactcaacacttatgggatgtttgtgagctggatccgtcagcctccagggaaggccctagagtggcttgcacacattcattgggatgatgataaatactacagcacatctctgaagaccaggctcaccatctccaaggacacctccaaaaaccaggtggtccttacaatgaccaacatggaccctgtggacacagccacgtattattgtgcacgggggcacaataatttgaactacatcatccactggggccagggaaccctggtcaccgtctcctca

SEQ ID NO: 267 - protein, 120 aa, synthetic construct
  REGION 1..120: note = Synthetic
QVTLRESGPALVKPSQTLTLTCTFSGFSLNTYGMFVSWIRQPPGKALEWLAHIHWDDDKYYSTSLKTRLTISKDTSKNQVVLTMTNMDPVDTATYYCARGHNNLNYIIHWGQGTLVTVSS

SEQ ID NO: 268 - protein, 10 aa, synthetic construct
  REGION 1..10: note = Synthetic
GFSLNTYGMF

SEQ ID NO: 269 - protein, 7 aa, synthetic construct
  REGION 1..7: note = Synthetic
IHWDDDK

SEQ ID NO: 270 - protein, 12 aa, synthetic construct
  REGION 1..12: note = Synthetic
ARGHNNLNYIIH

SEQ ID NO: 271 - DNA, 321 bp, synthetic construct
  misc_feature 1..321: note = Synthetic
  source 1..321: mol_type = other DNA
gccatccagatgacccagtctccatcctccctgtctgcatctgtaggagacagagtcaccatcacttgccgggcaagtcagggcattagaaatgatttaggctggtatcagcagaaaccagggaaagcccctaagctcctgatctatgctgcatccactttacaaagtggggtcccatcaaggttcagcggcagtggatctggcacagatttcactctcaccatcagcagcctgcagcctgaagattttgcaacttattactgtctacaagattacaattacccattcactttcggccctgggaccaaagtggatatcaaa

SEQ ID NO: 272 - protein, 107 aa, synthetic construct
  REGION 1..107: note = Synthetic
AIQMTQSPSSLSASVGDRVTITCRASQGIRNDLGWYQQKPGKAPKLLIYAASTLQSGVPSRFSGSGSGTDFTLTISSLQPEDFATYYCLQDYNYPFTFGPGTKVDIK

SEQ ID NO: 273 - protein, 6 aa, synthetic construct
  REGION 1..6: note = Synthetic
QGIRND

SEQ ID NO: 274 - skipped

SEQ ID NO: 275 - protein, 9 aa, synthetic construct
  REGION 1..9: note = Synthetic
LQDYNYPFT

SEQ ID NO: 276 - DNA, 348 bp, synthetic construct
  misc_feature 1..348: note = Synthetic
  source 1..348: mol_type = other DNA
gaggtgcagctggtggagtctgggggaggcttggtacagcctggagggtccctgagactctcctgtgcagtctctggattcatcttcagtagttatgaaatgaactgggtccgccaggctccagggaaggggctggagtgggtttcatacattagtagtagtggtagtaccatattctacgcagactctgtgaagggccgattcaccatctccagagacaacgccaagaactcactgtatctgcaaatgaacagcctgagagccgaggacacggctgtttattactgtgtgtctggagtggtcctttttgatgtctggggccaagggacaatggtcaccgtctcttca

SEQ ID NO: 277 - protein, 116 aa, synthetic construct
  REGION 1..116: note = Synthetic
EVQLVESGGGLVQPGGSLRLSCAVSGFIFSSYEMNWVRQAPGKGLEWVSYISSSGSTIFYADSVKGRFTISRDNAKNSLYLQMNSLRAEDTAVYYCVSGVVLFDVWGQGTMVTVSS

SEQ ID NO: 278 - protein, 8 aa, synthetic construct
  REGION 1..8: note = Synthetic
GFIFSSYE

SEQ ID NO: 279 - protein, 8 aa, synthetic construct
  REGION 1..8: note = Synthetic
ISSSGSTI

SEQ ID NO: 280 - protein, 9 aa, synthetic construct
  REGION 1..9: note = Synthetic
VSGVVLFDV

SEQ ID NO: 281 - DNA, 321 bp, synthetic construct
  misc_feature 1..321: note = Synthetic
  source 1..321: mol_type = other DNA
gaaatagtgatgacgcagtctccagccaccctgtctgtgtctccgggggaaagagccaccctctcctgcagggccagtcagagtgttagcagcaactttgcctggtaccaacagaaacctggccaggctcccaggctcctcatctatagtgcatcctccagggccactggtatcccagtcaggttcagtggcagtgggtctgggacagagttcactctcaccatcagcagcctgcagtctgaagattttgcagtttattactgtcagcagtataatatctggcctcggacgttcggccaagggaccaaggtggaaatcaaa

SEQ ID NO: 282 - protein, 107 aa, synthetic construct
  REGION 1..107: note = Synthetic
EIVMTQSPATLSVSPGERATLSCRASQSVSSNFAWYQQKPGQAPRLLIYSASSRATGIPVRFSGSGSGTEFTLTISSLQSEDFAVYYCQQYNIWPRTFGQGTKVEIK

SEQ ID NO: 283 - protein, 6 aa, synthetic construct
  REGION 1..6: note = Synthetic
QSVSSN

SEQ ID NO: 284 - skipped

SEQ ID NO: 285 - protein, 9 aa, synthetic construct
  REGION 1..9: note = Synthetic
QQYNIWPRT

SEQ ID NO: 286 - DNA, 375 bp, synthetic construct
  misc_feature 1..375: note = Synthetic
  source 1..375: mol_type = other DNA
gaggtgcagctggtggagtctgggggaggcttggtccagcctggggggtccctgagactctcctgtgcagcctctggattcacctttagtaactattggatgacctgggtccgccaggctccagggaaggggctggagtgggtggccaacataaaggaagatggaagtgagaaagactatgtggactctgtgaagggccgattcaccatctccagagacaacgccaagaactcactgtatctgcaaatgaacagcctgagaggcgaggacacggctgtgtattactgtgcgagagatggggagcagctcgtcgattactactactactacgttatggacgtctggggccaagggaccacggtcaccgtctcctca

SEQ ID NO: 287 - protein, 125 aa, synthetic construct
  REGION 1..125: note = Synthetic
EVQLVESGGGLVQPGGSLRLSCAASGFTFSNYWMTWVRQAPGKGLEWVANIKEDGSEKDYVDSVKGRFTISRDNAKNSLYLQMNSLRGEDTAVYYCARDGEQLVDYYYYYVMDVWGQGTTVTVSS

SEQ ID NO: 288 - protein, 8 aa, synthetic construct
  REGION 1..8: note = Synthetic
GFTFSNYW

SEQ ID NO: 289 - protein, 8 aa, synthetic construct
  REGION 1..8: note = Synthetic
IKEDGSEK

SEQ ID NO: 290 - protein, 18 aa, synthetic construct
  REGION 1..18: note = Synthetic
ARDGEQLVDYYYYYVMDV

SEQ ID NO: 291 - DNA, 321 bp, synthetic construct
  misc_feature 1..321: note = Synthetic
  source 1..321: mol_type = other DNA
gacatccagatgacccagtctccatcttccgtgtctgcatctgtaggagacagagtcaccatcacttgtcgggcgagtcagggtattagcagctggttagcctggtatcagcagaaaccagggaaagcccctaagctcctgatctatgctgcatccagtttgcaaagtggggtcccatcaaggttcagcggcagtggatctgggacagatttcactctcaccatcagcagcctgcagcctgaagattttgcaacttactattgtcaaaaggctaacagtttcccgtacacttttggccaggggaccaagctggagatcaaa

SEQ ID NO: 292 - protein, 107 aa, synthetic construct
  REGION 1..107: note = Synthetic
DIQMTQSPSSVSASVGDRVTITCRASQGISSWLAWYQQKPGKAPKLLIYAASSLQSGVPSRFSGSGSGTDFTLTISSLQPEDFATYYCQKANSFPYTFGQGTKLEIK

SEQ ID NO: 293 - protein, 6 aa, synthetic construct
  REGION 1..6: note = Synthetic
QGISSW

SEQ ID NO: 294 - skipped

SEQ ID NO: 295 - protein, 9 aa, synthetic construct
  REGION 1..9: note = Synthetic
QKANSFPYT

SEQ ID NO: 296 - DNA, 381 bp, synthetic construct
  misc_feature 1..381: note = Synthetic
  source 1..381: mol_type = other DNA
gaagtgcagctggtggagtctgggggaggcttggtacagcctggcaggtccctgagactctcctgtgcagcctctggattcacctttgatgactatgccatgcactgggtccggcaagctccagggaagggcctggagtgggtctcaggtattagttggaatagtggttacataggctatgcggactctgtgaagggccgattcaccatctccagagacaacgccgagaactccctacatctgcaaatgaacagtctgagagctgaggacacggccttgtattactgtgcaagagggggatctactctggttcggggagttaagggaggctactacggtatggacgtctggggccaagggaccacggtcaccgtctcctca

SEQ ID NO: 297 - protein, 127 aa, synthetic construct
  REGION 1..127: note = Synthetic
EVQLVESGGGLVQPGRSLRLSCAASGFTFDDYAMHWVRQAPGKGLEWVSGISWNSGYIGYADSVKGRFTISRDNAENSLHLQMNSLRAEDTALYYCARGGSTLVRGVKGGYYGMDVWGQGTTVTVSS

SEQ ID NO: 298 - protein, 8 aa, synthetic construct
  REGION 1..8: note = Synthetic
GFTFDDYA

SEQ ID NO: 299 - protein, 8 aa, synthetic construct
  REGION 1..8: note = Synthetic
ISWNSGYI

SEQ ID NO: 300 - protein, 20 aa, synthetic construct
  REGION 1..20: note = Synthetic
ARGGSTLVRGVKGGYYGMDV

SEQ ID NO: 301 - DNA, 321 bp, synthetic construct
  misc_feature 1..321: note = Synthetic
  source 1..321: mol_type = other DNA
gacatccagatgacccagtctccatcctccctgtctgcatctgtaggagacagagtcaccatcacttgccgggcaagtcagagcataagtagctatttaaattggtatcagcagaaaccaggtaaagcccctaaggtcctgatctatgctgcatccagtttgcaaagtggggtcccatcaaggttcagtggcagtggatctgggacagatttcactctcaccatcagcagtctgcaacctgaagattttgcaacttactactgtcaacagagttacagtattccgctcactttcggcggagggaccaaggtggagatcaaa

SEQ ID NO: 302 - protein, 107 aa, synthetic construct
  REGION 1..107: note = Synthetic
DIQMTQSPSSLSASVGDRVTITCRASQSISSYLNWYQQKPGKAPKVLIYAASSLQSGVPSRFSGSGSGTDFTLTISSLQPEDFATYYCQQSYSIPLTFGGGTKVEIK

SEQ ID NO: 303 - protein, 6 aa, synthetic construct
  REGION 1..6: note = Synthetic
QSISSY

SEQ ID NO: 304 - skipped

SEQ ID NO: 305 - protein, 9 aa, synthetic construct
  REGION 1..9: note = Synthetic
QQSYSIPLT

SEQ ID NO: 306 - DNA, 351 bp, synthetic construct
  misc_feature 1..351: note = Synthetic
  source 1..351: mol_type = other DNA
caggtgcagctggtggagtctgggggaggcgtggtccagcctgggaggtccctgagactctcctgtgcagcgtctggattcaccttcagtagctatggcatgcactgggtccgccaggctccaggcaaggggctggagtgggtggcagttatatggtatgatggaagtaataaatactatgcagactccgtgaagggccgattcaccatctccagagacatttccaagaacacgctgtatctgcaaatgaacagcctgagagccgaggacacggccgtatattactgtgcgggtcaactggatctcttctttgactactggggccagggaaccctggtcaccgtctcctca

SEQ ID NO: 307 - protein, 117 aa, synthetic construct
  REGION 1..117: note = Synthetic
QVQLVESGGGVVQPGRSLRLSCAASGFTFSSYGMHWVRQAPGKGLEWVAVIWYDGSNKYYADSVKGRFTISRDISKNTLYLQMNSLRAEDTAVYYCAGQLDLFFDYWGQGTLVTVSS

SEQ ID NO: 308 - protein, 8 aa, synthetic construct
  REGION 1..8: note = Synthetic
GFTFSSYG

SEQ ID NO: 309 - protein, 8 aa, synthetic construct
  REGION 1..8: note = Synthetic
IWYDGSNK

SEQ ID NO: 310 - protein, 10 aa, synthetic construct
  REGION 1..10: note = Synthetic
AGQLDLFFDY

SEQ ID NO: 311 - DNA, 321 bp, synthetic construct
  misc_feature 1..321: note = Synthetic
  source 1..321: mol_type = other DNA
gacatccagatgacccagtctccatcctccctgtctgcatctgtaggagacagagtcaccatcacttgccgggcaagtcagagcattgacaggtatttaaattggtatcggcagaaaccagggaaagcccctaagctcctgatctatactacatccagtttgcaaagtggggtcccatcaaggttcagtggcagtggatctgggacagatttcactctcaccctcagcagtctgcagcctgaagattttgcaacttactactgtcagcagagttacagtcccccgctcactttcggcggagggaccaaggtggagatcaaa

SEQ ID NO: 312 - protein, 107 aa, synthetic construct
  REGION 1..107: note = Synthetic
DIQMTQSPSSLSASVGDRVTITCRASQSIDRYLNWYRQKPGKAPKLLIYTTSSLQSGVPSRFSGSGSGTDFTLTLSSLQPEDFATYYCQQSYSPPLTFGGGTKVEIK

SEQ ID NO: 313 - protein, 6 aa, synthetic construct
  REGION 1..6: note = Synthetic
QSIDRY

SEQ ID NO: 314 - skipped

SEQ ID NO: 315 - protein, 9 aa, synthetic construct
  REGION 1..9: note = Synthetic
QQSYSPPLT

SEQ ID NO: 316 - DNA, 375 bp, synthetic construct
  misc_feature 1..375: note = Synthetic
  source 1..375: mol_type = other DNA
gaggtgcagctggtggagtctgggggaggcttggtccagcctggggggtccctgagactctcctgtacagcctctggattcacctttagtaactattggatgacctgggtccgccaggctccagggaaggggctggagtgggtggccaacataaaggaagatggaagtgagaaagagtatgtggactctgtgaagggccggttcaccatctccagagacaacgccaagaattcactgtatctgcaaatgaacagcctgagaggcgaggacacggctgtatattactgtgcgagagatggggagcagctcgtcgattactattactactacgttatggacgtctggggccaagggaccacggtcaccgtctcctca

SEQ ID NO: 317 - protein, 125 aa, synthetic construct
  REGION 1..125: note = Synthetic
EVQLVESGGGLVQPGGSLRLSCTASGFTFSNYWMTWVRQAPGKGLEWVANIKEDGSEKEYVDSVKGRFTISRDNAKNSLYLQMNSLRGEDTAVYYCARDGEQLVDYYYYYVMDVWGQGTTVTVSS

SEQ ID NO: 318 - protein, 8 aa, synthetic construct
  REGION 1..8: note = Synthetic
GFTFSNYW

SEQ ID NO: 319 - protein, 8 aa, synthetic construct
  REGION 1..8: note = Synthetic
IKEDGSEK

SEQ ID NO: 320 - protein, 18 aa, synthetic construct
  REGION 1..18: note = Synthetic
ARDGEQLVDYYYYYVMDV

SEQ ID NO: 321 - DNA, 321 bp, synthetic construct
  misc_feature 1..321: note = Synthetic
  source 1..321: mol_type = other DNA
gacatccagatgacccagtctccatcttccgtgtctgcatctgttggagacagagtcaccatcacttgtcgggcgagtcagggtattagcagctggttagcctggtatcagcagaaaccagggaaagcccctaagctcctgatctatgctgcatccagtttgcaaagtggggtcccatcaaggttcagcggcagtggatctgggacagatttcactctcaccatcagcagcctgcagcctgaagattttgcaacttactattgtcaaaaggctgacagtctcccgtacgcttttggccaggggaccaagctggagatcaaa

SEQ ID NO: 322 - protein, 107 aa, synthetic construct
  REGION 1..107: note = Synthetic
DIQMTQSPSSVSASVGDRVTITCRASQGISSWLAWYQQKPGKAPKLLIYAASSLQSGVPSRFSGSGSGTDFTLTISSLQPEDFATYYCQKADSLPYAFGQGTKLEIK

SEQ ID NO: 323 - protein, 6 aa, synthetic construct
  REGION 1..6: note = Synthetic
QGISSW

SEQ ID NO: 324 - skipped

SEQ ID NO: 325 - protein, 9 aa, synthetic construct
  REGION 1..9: note = Synthetic
QKADSLPYA

SEQ ID NO: 326 - DNA, 363 bp, synthetic construct
  misc_feature 1..363: note = Synthetic
  source 1..363: mol_type = other DNA
gaggtgcagctggtggagtctgggggaggcttggttcagcctggggggtccctgagactctcctgtgcaacctctggattcacctttaccagctatgacatgaagtgggtccgccaggctccagggctgggcctggagtgggtctcagctattagtggtagtggtggtaacacatactacgcagactccgtgaagggccggttcaccatctccagagacaattccaggaacacgctgtatctgcaaatgaacagcctgagagccgaggacacggccgtatattactgtacgaggtcccatgacttcggtgccttcgactactttgactactggggccagggaaccctggtcaccgtctcctca

SEQ ID NO: 327 - protein, 121 aa, synthetic construct
  REGION 1..121: note = Synthetic
EVQLVESGGGLVQPGGSLRLSCATSGFTFTSYDMKWVRQAPGLGLEWVSAISGSGGNTYYADSVKGRFTISRDNSRNTLYLQMNSLRAEDTAVYYCTRSHDFGAFDYFDYWGQGTLVTVSS

SEQ ID NO: 328 - protein, 8 aa, synthetic construct
  REGION 1..8: note = Synthetic
GFTFTSYD

SEQ ID NO: 329 - protein, 8 aa, synthetic construct
  REGION 1..8: note = Synthetic
ISGSGGNT

SEQ ID NO: 330 - protein, 14 aa, synthetic construct
  REGION 1..14: note = Synthetic
TRSHDFGAFDYFDY

SEQ ID NO: 331 - DNA, 321 bp, synthetic construct
  misc_feature 1..321: note = Synthetic
  source 1..321: mol_type = other DNA
gacatccagatgacccagtctccatcctccctgtctgcatctgtgggagacagagtcaccatcacttgccgggcaagtcagggcattagagatcattttggctggtatcagcagaaaccagggaaagcccctaagcgcctgatctatgctgcatccagtttgcacagtggggtcccatcaaggttcagcggcagtggatctgggacagaattcactctcacaatcagcagcttgcagcctgaagattttgcaacctattactgtctacagtatgatacttacccgctcactttcggcggagggaccaaggtggagatcaaa

SEQ ID NO: 332 - protein, 107 aa, synthetic construct
  REGION 1..107: note = Synthetic
DIQMTQSPSSLSASVGDRVTITCRASQGIRDHFGWYQQKPGKAPKRLIYAASSLHSGVPSRFSGSGSGTEFTLTISSLQPEDFATYYCLQYDTYPLTFGGGTKVEIK

SEQ ID NO: 333 - protein, 6 aa, synthetic construct
  REGION 1..6: note = Synthetic
QGIRDH

SEQ ID NO: 334 - skipped

SEQ ID NO: 335 - protein, 9 aa, synthetic construct
  REGION 1..9: note = Synthetic
LQYDTYPLT

SEQ ID NO: 336 - DNA, 366 bp, synthetic construct
  misc_feature 1..366: note = Synthetic
  source 1..366: mol_type = other DNA
gaagtgcagctggtggagtctgggggagacttggtacagcctggcaggtccctgagactctcctgtgcagcctctggattcacctttgatgattatgccatgcactgggtccggcaagctccagggaagggcctggagtgggtctcaggtattagttggaatagtgctaccagagtctatgcggactctgtgaagggccgattcaccatctccagagacaacgccaagaatttcctgtatctgcaaatgaacagtctgagatctgaggacacggccttgtatcactgtgcaaaagatatggatatctcgctagggtactacggtttggacgtctggggccaagggaccacggtcaccgtctcctca

SEQ ID NO: 337 - protein, 122 aa, synthetic construct
  REGION 1..122: note = Synthetic
EVQLVESGGDLVQPGRSLRLSCAASGFTFDDYAMHWVRQAPGKGLEWVSGISWNSATRVYADSVKGRFTISRDNAKNFLYLQMNSLRSEDTALYHCAKDMDISLGYYGLDVWGQGTTVTVSS

SEQ ID NO: 338 - protein, 8 aa, synthetic construct
  REGION 1..8: note = Synthetic
GFTFDDYA

SEQ ID NO: 339 - protein, 8 aa, synthetic construct
  REGION 1..8: note = Synthetic
ISWNSATR

SEQ ID NO: 340 - protein, 15 aa, synthetic construct
  REGION 1..15: note = Synthetic
AKDMDISLGYYGLDV

SEQ ID NO: 341 - DNA, 324 bp, synthetic construct
  misc_feature 1..324: note = Synthetic
  source 1..324: mol_type = other DNA
gaaatagtgatgacgcagtctccagccaccctgtctgtgtctccaggggaaagagccaccctctcctgcagggccagtcagactgttagcagcaacttagcctggtatcagcagaaacctggccaggctcccaggctcctcatctatggttcatcctccagggccactggtatcccagccaggttcagtggcagtgggtctgggacagagttcactctcaccatcagcagcctgcagtctgaagattttgcagtttattactgtcagcagtataataactggcctccctacacttttggccaggggaccaagctggagatcaaa

SEQ ID NO: 342 - protein, 108 aa, synthetic construct
  REGION 1..108: note = Synthetic
EIVMTQSPATLSVSPGERATLSCRASQTVSSNLAWYQQKPGQAPRLLIYGSSSRATGIPARFSGSGSGTEFTLTISSLQSEDFAVYYCQQYNNWPPYTFGQGTKLEIK

SEQ ID NO: 343 - protein, 6 aa, synthetic construct
  REGION 1..6: note = Synthetic
QTVSSN

SEQ ID NO: 344 - skipped

SEQ ID NO: 345 - protein, 10 aa, synthetic construct
  REGION 1..10: note = Synthetic
QQYNNWPPYT

SEQ ID NO: 346 - DNA, 372 bp, synthetic construct
  misc_feature 1..372: note = Synthetic
  source 1..372: mol_type = other DNA
cagatcaccttgaaggagtctggtcctacgctggtgaaacccacacagaccctcacgctgacctgcaccttctctgggttctcactcagcactagtggagtgggtgtggtctggatccgtcagccccccggaaaggccctggagtggcttgcactcatttattggaatgatcataagcggtacagcccatctctggggagcaggctcaccatcaccaaggacacctccaaaaaccaggtggtccttacaatgaccaacatggaccctgtggacacagccacatattactgtgcacactacagtgggagctattcctactactactatggtttggacgtctggggccaagggaccacggtcaccgtctcctca

SEQ ID NO: 347 - protein, 124 aa, synthetic construct
  REGION 1..124: note = Synthetic
QITLKESGPTLVKPTQTLTLTCTFSGFSLSTSGVGVVWIRQPPGKALEWLALIYWNDHKRYSPSLGSRLTITKDTSKNQVVLTMTNMDPVDTATYYCAHYSGSYSYYYYGLDVWGQGTTVTVSS

SEQ ID NO: 348 - protein, 10 aa, synthetic construct
  REGION 1..10: note = Synthetic
GFSLSTSGVG

SEQ ID NO: 349 - protein, 7 aa, synthetic construct
  REGION 1..7: note = Synthetic
IYWNDHK

SEQ ID NO: 350 - protein, 16 aa, synthetic construct
  REGION 1..16: note = Synthetic
AHYSGSYSYYYYGLDV

SEQ ID NO: 351 - DNA, 321 bp, synthetic construct
  misc_feature 1..321: note = Synthetic
  source 1..321: mol_type = other DNA
gacatccagatgacccagtctccatcttccgtgtctgcatctgtaggagacagagtcaccatcacttgtcgggcgagtcagggtattgccagctggttagcctggtatcagcagaaaccagggaaagcccctgagctcctgatctatgctgcatccagtttgcaaggtggggtcccatcaaggttcagcggcagtggatctgggacagatttcactctcaccatcagcagcctgcagcctgaagattttgcaatttactattgtcaacaggctaactatttcccgtggacgttcggccaagggaccaaggtggaaatcaaa

SEQ ID NO: 352 - protein, 107 aa, synthetic construct
  REGION 1..107: note = Synthetic
DIQMTQSPSSVSASVGDRVTITCRASQGIASWLAWYQQKPGKAPELLIYAASSLQGGVPSRFSGSGSGTDFTLTISSLQPEDFAIYYCQQANYFPWTFGQGTKVEIK

SEQ ID NO: 353 - protein, 6 aa, synthetic construct
  REGION 1..6: note = Synthetic
QGIASW

SEQ ID NO: 354 - skipped

SEQ ID NO: 355 - protein, 9 aa, synthetic construct
  REGION 1..9: note = Synthetic
QQANYFPWT

SEQ ID NO: 356 - DNA, 363 bp, synthetic construct
  misc_feature 1..363: note = Synthetic
  source 1..363: mol_type = other DNA
gaggtgcagctgttggagtctgggggagccttggtacagcctggggggtccctgagactctcctgtgcagcctctggattcacctttacctcctatgccatgcactgggtccgccaggctccagggaagggtctggagtgggtctcatctattagaggtagtggtggtggcacatactccgcagactccgtgaagggccggttcaccatctccagagacaattccagggacactctatatctgcaaatgaacagtgtgagagccgaggacacggccgtttattactgtgcgaggtcccatgactacggtgccttcgacttctttgactactggggccagggaaccctggtcaccgtctcctca

SEQ ID NO: 357 - protein, 121 aa, synthetic construct
  REGION 1..121: note = Synthetic
EVQLLESGGALVQPGGSLRLSCAASGFTFTSYAMHWVRQAPGKGLEWVSSIRGSGGGTYSADSVKGRFTISRDNSRDTLYLQMNSVRAEDTAVYYCARSHDYGAFDFFDYWGQGTLVTVSS

SEQ ID NO: 358 - protein, 8 aa, synthetic construct
  REGION 1..8: note = Synthetic
GFTFTSYA

SEQ ID NO: 359 - protein, 8 aa, synthetic construct
  REGION 1..8: note = Synthetic
IRGSGGGT

SEQ ID NO: 360 - protein, 14 aa, synthetic construct
  REGION 1..14: note = Synthetic
ARSHDYGAFDFFDY

SEQ ID NO: 361 - DNA, 321 bp, synthetic construct
  misc_feature 1..321: note = Synthetic
  source 1..321: mol_type = other DNA
gacatccagatgacccagtctccatcctccctgtctgcatctgtaggagacagagtcaccatcacttgccgggcaagtcagggcattagaactgatttaggctggtatcagcagaaaccagggaaagcccctaagcgcctgatctatgctgcatccagtttgcaaagtggggtcccatcaaggttcagcggcagtggatctgggacagaattcactctcacaatcagcagcctgcggcctgaagattttgcaactttttactgtctacagtataatagttacccgctcactttcggcggagggaccaaggtggagatcaaa

SEQ ID NO: 362 - protein, 107 aa, synthetic construct
  REGION 1..107: note = Synthetic
DIQMTQSPSSLSASVGDRVTITCRASQGIRTDLGWYQQKPGKAPKRLIYAASSLQSGVPSRFSGSGSGTEFTLTISSLRPEDFATFYCLQYNSYPLTFGGGTKVEIK

SEQ ID NO: 363 - protein, 6 aa, synthetic construct
  REGION 1..6: note = Synthetic
QGIRTD

SEQ ID NO: 364 - skipped

SEQ ID NO: 365 - protein, 9 aa, synthetic construct
  REGION 1..9: note = Synthetic
LQYNSYPLT

SEQ ID NO: 366 - DNA, 348 bp, synthetic construct
  misc_feature 1..348: note = Synthetic
  source 1..348: mol_type = other DNA
caggtgcagctggtggagtctgggggaggcttggtcaagcctggagggtccctgagactctcctgtgcagcctctggattcaccttcagtgactacttcatgagctggatccgccaggctccagggaaggggctggagtgggtttcatacattagtagtactggtagtaccataaattatgcagactctgtgaagggccgattcaccatctccagggacaatgtcaagaattcactgtatctgcaaatgaccagcctgagagtcgaggacacggccgtgtattactgtacgagagataactggaactatgaatactggggccagggaaccctggtcaccgtctcctca

SEQ ID NO: 367 - protein, 116 aa, synthetic construct
  REGION 1..116: note = Synthetic
QVQLVESGGGLVKPGGSLRLSCAASGFTFSDYFMSWIRQAPGKGLEWVSYISSTGSTINYADSVKGRFTISRDNVKNSLYLQMTSLRVEDTAVYYCTRDNWNYEYWGQGTLVTVSS

SEQ ID NO: 368 - protein, 8 aa, synthetic construct
  REGION 1..8: note = Synthetic
GFTFSDYF

SEQ ID NO: 369 - protein, 8 aa, synthetic construct
  REGION 1..8: note = Synthetic
ISSTGSTI

SEQ ID NO: 370 - protein, 9 aa, synthetic construct
  REGION 1..9: note = Synthetic
TRDNWNYEY

SEQ ID NO: 371 - DNA, 321 bp, synthetic construct
  misc_feature 1..321: note = Synthetic
  source 1..321: mol_type = other DNA
gaaatagtgatgacgcagtctccagccaccctgtctgtgtctccaggggaaagagccaccctctcctgcagggccagtcagagtgttagcatcaacttagcctggtaccagcagaaacctggccaggctcccaggctcctcatctttgttgcatccaccagggccactggtatcccagccaggttcagtggcagtgggtctgggacagagttcactctcaccatcagcagcctgcagtctgaagattttgcaacttattactgtcagcagtatgatatctggccgtacacttttggccaggggaccaagctggagatcaaa

SEQ ID NO: 372 - protein, 107 aa, synthetic construct
  REGION 1..107: note = Synthetic
EIVMTQSPATLSVSPGERATLSCRASQSVSINLAWYQQKPGQAPRLLIFVASTRATGIPARFSGSGSGTEFTLTISSLQSEDFATYYCQQYDIWPYTFGQGTKLEIK

SEQ ID NO: 373 - protein, 6 aa, synthetic construct
  REGION 1..6: note = Synthetic
QSVSIN

SEQ ID NO: 374 - skipped

SEQ ID NO: 375 - protein, 9 aa, synthetic construct
  REGION 1..9: note = Synthetic
QQYDIWPYT

SEQ ID NO: 376 - DNA, 369 bp, synthetic construct
  misc_feature 1..369: note = Synthetic
  source 1..369: mol_type = other DNA
cagctgcagctgcaggagtcgggcccaggactggtgaagccttcggagaccctgtccctcacctgcactgtgtctggtgaatccatcagcagtaatacttactactggggctggatccgccagcccccagggaaggggctggaatggattgggagtatcgattatagtgggaccaccaattataacccgtccctcaagagtcgagtcaccatatccgtagacacgtccaggaatcacttctccctgaggctgaggtctgtgaccgccgcagacacggctgtgtattactgtgcgagagagtggggaaactacggctactattacggtatggacgtttggggccaagggaccacggtcaccgtctcctca

SEQ ID NO: 377 - protein, 123 aa, synthetic construct
  REGION 1..123: note = Synthetic
QLQLQESGPGLVKPSETLSLTCTVSGESISSNTYYWGWIRQPPGKGLEWIGSIDYSGTTNYNPSLKSRVTISVDTSRNHFSLRLRSVTAADTAVYYCAREWGNYGYYYGMDVWGQGTTVTVSS

SEQ ID NO: 378 - protein, 10 aa, synthetic construct
  REGION 1..10: note = Synthetic
GESISSNTYY

SEQ ID NO: 379 - protein, 7 aa, synthetic construct
  REGION 1..7: note = Synthetic
IDYSGTT

SEQ ID NO: 380 - protein, 15 aa, synthetic construct
  REGION 1..15: note = Synthetic
AREWGNYGYYYGMDV

SEQ ID NO: 381 - DNA, 321 bp, synthetic construct
  misc_feature 1..321: note = Synthetic
  source 1..321: mol_type = other DNA
gacatccagatgacccagtctccatcctccctgtctgcatctgtaggagacagagtcaccatcaattgccgggcaagtcagggcattagaaatgatttaggctggtatcagcagaaaccagggaaagcccctaagcgcctgatctatgctgcatccagtttgcaaagtggggtcccattaaggttcagtggcagtggatctgggacagaattcactctcacaatcaacaacctgcagcctgaagattttgcaacttattactgtctatcgcataatagttacccgtggacgttcggccaagggaccaaggtggaaatcaaa

SEQ ID NO: 382 - protein, 107 aa, synthetic construct
  REGION 1..107: note = Synthetic
DIQMTQSPSSLSASVGDRVTINCRASQGIRNDLGWYQQKPGKAPKRLIYAASSLQSGVPLRFSGSGSGTEFTLTINNLQPEDFATYYCLSHNSYPWTFGQGTKVEIK

SEQ ID NO: 383 - protein, 6 aa, synthetic construct
  REGION 1..6: note = Synthetic
QGIRND

SEQ ID NO: 384 - skipped

SEQ ID NO: 385 - protein, 9 aa, synthetic construct
  REGION 1..9: note = Synthetic
LSHNSYPWT

SEQ ID NO: 386 - DNA, 354 bp, synthetic construct
  misc_feature 1..354: note = Synthetic
  source 1..354: mol_type = other DNA
caggtgcagctggtgcagtctggggctgaggtgaagaagcctgggtcctcggtgagggtctcctgcaaggcttctagaggcaccttcagcagctatgctatcagctgggtgcgacaggcccctggacaaggccttgagtggatgggagggatcatccccatctttggtacagcaaactacgcacagaagttcctggccagagtcacgattaccgcggacgaatccacgagcacagcctacatggagctgagcagcctgagatctgaggacacggccgtgtattactgtgcgagagagaaggggtggaactactttgactactggggccagggaaccctggtcaccgtctcctca

SEQ ID NO: 387 - protein, 118 aa, synthetic construct
  REGION 1..118: note = Synthetic
QVQLVQSGAEVKKPGSSVRVSCKASRGTFSSYAISWVRQAPGQGLEWMGGIIPIFGTANYAQKFLARVTITADESTSTAYMELSSLRSEDTAVYYCAREKGWNYFDYWGQGTLVTVSS

SEQ ID NO: 388 - protein, 8 aa, synthetic construct
  REGION 1..8: note = Synthetic
RGTFSSYA

SEQ ID NO: 389 - protein, 8 aa, synthetic construct
  REGION 1..8: note = Synthetic
IIPIFGTA

SEQ ID NO: 390 - protein, 11 aa, synthetic construct
  REGION 1..11: note = Synthetic
AREKGWNYFDY

SEQ ID NO: 391 - DNA, 321 bp, synthetic construct
  misc_feature 1..321: note = Synthetic
  source 1..321: mol_type = other DNA
gacatccagatgacccagtctccaccttccgtgtctgcatctgtaggagacagagtcaccatcacttgtcgggcgagtcagggtattagcagctggttagcctggtatcagcagaaaccagggaaagcccctaaactcctgatctatgctgcatccagtttgcaaagtggggtcccatcaaggttcagcggcagtggatctgggacagatttcactctcaccatcagcagcctgcagcctgaagattttgcaacttactattgtcaacaggctaacagtttccctcggacgttcggccaagggaccaaggtggaaatcaaa

SEQ ID NO: 392 - protein, 107 aa, synthetic construct
  REGION 1..107: note = Synthetic
DIQMTQSPPSVSASVGDRVTITCRASQGISSWLAWYQQKPGKAPKLLIYAASSLQSGVPSRFSGSGSGTDFTLTISSLQPEDFATYYCQQANSFPRTFGQGTKVEIK

SEQ ID NO: 393 - protein, 6 aa, synthetic construct
  REGION 1..6: note = Synthetic
QGISSW

SEQ ID NO: 394 - skipped

SEQ ID NO: 395 - protein, 9 aa, synthetic construct
  REGION 1..9: note = Synthetic
QQANSFPRT

SEQ ID NO: 396 - DNA, 369 bp, synthetic construct
  misc_feature 1..369: note = Synthetic
  source 1..369: mol_type = other DNA
caggtgcagctggtggagtctgggggaggcttggtcaagcctggagggtccctgagactctcctgtgcagcctctggattcaccttcagtgactactacatgaactggatccgccaggctccagggaaggggctggagtgggtttcatacattagtagtagtgggactaccatatactacgcagactctgtgaagggccgattcaccatctccagggacaacgccaagaaatcactgtatctggagatgaacagcctcagagccgaggacacggccgtgtactactgtgcgagagaggggtacggtaatgactactattactacggtatagacgtctggggccaagggaccacggtcaccgtctcctca

SEQ ID NO: 397 - protein, 123 aa, synthetic construct
  REGION 1..123: note = Synthetic
QVQLVESGGGLVKPGGSLRLSCAASGFTFSDYYMNWIRQAPGKGLEWVSYISSSGTTIYYADSVKGRFTISRDNAKKSLYLEMNSLRAEDTAVYYCAREGYGNDYYYYGIDVWGQGTTVTVSS

SEQ ID NO: 398 - protein, 8 aa, synthetic construct
  REGION 1..8: note = Synthetic
GFTFSDYY

SEQ ID NO: 399 - protein, 8 aa, synthetic construct
  REGION 1..8: note = Synthetic
ISSSGTTI

SEQ ID NO: 400 - protein, 16 aa, synthetic construct
  REGION 1..16: note = Synthetic
AREGYGNDYYYYGIDV

SEQ ID NO: 401 - DNA, 336 bp, synthetic construct
  misc_feature 1..336: note = Synthetic
  source 1..336: mol_type = other DNA
gatattgtgatgactcagtctccactctccctgcccgtcacccctggagagccggcctccatctcctgcaggtctagtcagagcctcctgcatggtaatggatacaactatttgacttggtacctgcagaagccagggcagtctccacagctcctgatctatttgggttctaatcgggcctccggggtccctgacaggttcagtggcagtggatcaggcacagattttacactgaaaataagcagagtggaggctgaggatgttggggtttattactgcatgcaagctctacaaactccgtacacttttggccaggggaccaagctggagatcaaa

SEQ ID NO: 402 - protein, 112 aa, synthetic construct
  REGION 1..112: note = Synthetic
DIVMTQSPLSLPVTPGEPASISCRSSQSLLHGNGYNYLTWYLQKPGQSPQLLIYLGSNRASGVPDRFSGSGSGTDFTLKISRVEAEDVGVYYCMQALQTPYTFGQGTKLEIK

SEQ ID NO: 403 - protein, 11 aa, synthetic construct
  REGION 1..11: note = Synthetic
QSLLHGNGYNY

SEQ ID NO: 404 - skipped

SEQ ID NO: 405 - protein, 9 aa, synthetic construct
  REGION 1..9: note = Synthetic
MQALQTPYT

SEQ ID NO: 406 - DNA, 366 bp, synthetic construct
  misc_feature 1..366: note = Synthetic
  source 1..366: mol_type = other DNA
caggtgcagctggtggagtctgggggaggcgtggtccagcctgggaggtccctgagactctcctgtgcagcctctggattcaccttcagtagctttggcatgcactgggtccgccaggctccaggcaaggggctggagtgggtgatatttatatcatatgatggaagtgataaatactatgcagactccgtgaagggccgattcgccatctccagagacagttccaagaacacgctatatctgcaaatgaacagcctgagagctgaggacacggctgtgtattactgtgcgaaagaaaacggtattttgactgattcctacggtatggacgtctggggccaagggaccacggtcaccgtctcctca

SEQ ID NO: 407 - protein, 122 aa, synthetic construct
  REGION 1..122: note = Synthetic
QVQLVESGGGVVQPGRSLRLSCAASGFTFSSFGMHWVRQAPGKGLEWVIFISYDGSDKYYADSVKGRFAISRDSSKNTLYLQMNSLRAEDTAVYYCAKENGILTDSYGMDVWGQGTTVTVSS

SEQ ID NO: 408 - protein, 8 aa, synthetic construct
  REGION 1..8: note = Synthetic
GFTFSSFG

SEQ ID NO: 409 - protein, 8 aa, synthetic construct
  REGION 1..8: note = Synthetic
ISYDGSDK

SEQ ID NO: 410 - protein, 15 aa, synthetic construct
  REGION 1..15: note = Synthetic
AKENGILTDSYGMDV

SEQ ID NO: 411 - DNA, 324 bp, synthetic construct
  misc_feature 1..324: note = Synthetic
  source 1..324: mol_type = other DNA
gacatccagatgacccagtctccatcctccctgtctgcatctgtaggagacagagtcaccatcacttgccgggcaagtcagagcattagcagctatttaaattggtatcagcagaaaccagggaaagcccctaagctcctgatctatgctgcatccagtttgcaaagtggggtcccgtcaaggttcagtggcagtggatctgggacagatttcactctcaccatcagcagtctgcaacctgaagattttgcaacttactactgtcaacagagttacagtacccctccgatcaccttcggccaagggacacgactggagattaaa

SEQ ID NO: 412 - protein, 108 aa, synthetic construct
  REGION 1..108: note = Synthetic
DIQMTQSPSSLSASVGDRVTITCRASQSISSYLNWYQQKPGKAPKLLIYAASSLQSGVPSRFSGSGSGTDFTLTISSLQPEDFATYYCQQSYSTPPITFGQGTRLEIK

SEQ ID NO: 413 - protein, 6 aa, synthetic construct
  REGION 1..6: note = Synthetic
QSISSY

SEQ ID NO: 414 - skipped

SEQ ID NO: 415 - protein, 10 aa, synthetic construct
  REGION 1..10: note = Synthetic
QQSYSTPPIT

SEQ ID NO: 416 - DNA, 372 bp, synthetic construct
  misc_feature 1..372: note = Synthetic
  source 1..372: mol_type = other DNA
caggttcagctggtgcagtctggagctgaggtgaagaagcctggggcctctgtgaaggtctcctgcaaggcttctggttacacctttaccagctatggtatcagctgggtgcgacaggcccctggacaagggcttgagtggatgggatggatcagtgtttaccatggtaacacaaactatgcacagaagttccagggcagagtcaccatgaccacagacacatccacgagcacagcctacatggagctgaggagcctgagatctgacgacacggccgtgtattactgtgcgagagaggggtattacgatttttggagtggttattacccttttgactactggggccagggaaccctggtcaccgtctcctca

SEQ ID NO: 417 - protein, 124 aa, synthetic construct
  REGION 1..124: note = Synthetic
QVQLVQSGAEVKKPGASVKVSCKASGYTFTSYGISWVRQAPGQGLEWMGWISVYHGNTNYAQKFQGRVTMTTDTSTSTAYMELRSLRSDDTAVYYCAREGYYDFWSGYYPFDYWGQGTLVTVSS

SEQ ID NO: 418 - protein, 8 aa, synthetic construct
  REGION 1..8: note = Synthetic
GYTFTSYG

SEQ ID NO: 419 - protein, 8 aa, synthetic construct
  REGION 1..8: note = Synthetic
ISVYHGNT

SEQ ID NO: 420 - protein, 17 aa, synthetic construct
  REGION 1..17: note = Synthetic
AREGYYDFWSGYYPFDY

SEQ ID NO: 421 - DNA, 324 bp, synthetic construct; identical to SEQ ID NO: 411
  misc_feature 1..324: note = Synthetic
  source 1..324: mol_type = other DNA

SEQ ID NO: 422 - protein, 108 aa, synthetic construct; identical to SEQ ID NO: 412
  REGION 1..108: note = Synthetic

SEQ ID NO: 423 - protein, 6 aa, synthetic construct
  REGION 1..6: note = Synthetic
QSISSY

SEQ ID NO: 424 - skipped

SEQ ID NO: 425 - protein, 10 aa, synthetic construct
  REGION 1..10: note = Synthetic
QQSYSTPPIT

SEQ ID NO: 426 - DNA, 354 bp, synthetic construct
  misc_feature 1..354: note = Synthetic
  source 1..354: mol_type = other DNA
gaggtgcagctggtggagtctgggggaggcttgatacaacctggagggtccctgagactctcctgtgaagcctctggattcaccttcagaaattatgaaatgaattgggtccgccaggctccagggaaggggctggagtgggtttcatatattagtagtagtggtaatatgaaagactacgcagagtctgtgaagggccgattcaccatctccagagacaatgtcaagaattcactgcagctgcaaatgaacagcctgagagtcgaggacacggctgtttattactgtgcgagagacgagtttccttacggaatggacgtctggggccaagggaccacggtcaccgtctcctca

SEQ ID NO: 427 - protein, 118 aa, synthetic construct
  REGION 1..118: note = Synthetic
EVQLVESGGGLIQPGGSLRLSCEASGFTFRNYEMNWVRQAPGKGLEWVSYISSSGNMKDYAESVKGRFTISRDNVKNSLQLQMNSLRVEDTAVYYCARDEFPYGMDVWGQGTTVTVSS

SEQ ID NO: 428 - protein, 8 aa, synthetic construct
  REGION 1..8: note = Synthetic
GFTFRNYE

SEQ ID NO: 429 - protein, 8 aa, synthetic construct
  REGION 1..8: note = Synthetic
ISSSGNMK

SEQ ID NO: 430 - protein, 11 aa, synthetic construct
  REGION 1..11: note = Synthetic
ARDEFPYGMDV

SEQ ID NO: 431 - DNA, 324 bp, synthetic construct; identical to SEQ ID NO: 411
  misc_feature 1..324: note = Synthetic
  source 1..324: mol_type = other DNA

SEQ ID NO: 432 - protein, 108 aa, synthetic construct; identical to SEQ ID NO: 412
  REGION 1..108: note = Synthetic

SEQ ID NO: 433 - protein, 6 aa, synthetic construct
  REGION 1..6: note = Synthetic
QSISSY

SEQ ID NO: 434 - skipped

SEQ ID NO: 435 - protein, 10 aa, synthetic construct
  REGION 1..10: note = Synthetic
QQSYSTPPIT

SEQ ID NO: 436 - DNA, 363 bp, synthetic construct
  misc_feature 1..363: note = Synthetic
  source 1..363: mol_type = other DNA
gaagtgcagctggtggagtctgggggaggcttggttcagcctggcaggtccctgagactctcctgtgcagcctctggattcacctttgatgattatgccatgaactgggtccggcaagctccagggaagggcctggagtgggtctcaggtattagttggagtagtggtagcatggactatgcggactctgtgaagggccgattcaccatctccagagacaacgccaaaaactccctgtatctgcaaatgaacagtctgagaactgaggacacggccttatattactgtgcaaaagctagggaagttggagactactacggtatggacgtctggggccaagggaccacggtcaccgtctcctca

SEQ ID NO: 437 - protein, 121 aa, synthetic construct
  REGION 1..121: note = Synthetic
EVQLVESGGGLVQPGRSLRLSCAASGFTFDDYAMNWVRQAPGKGLEWVSGISWSSGSMDYADSVKGRFTISRDNAKNSLYLQMNSLRTEDTALYYCAKAREVGDYYGMDVWGQGTTVTVSS

SEQ ID NO: 438 - protein, 8 aa, synthetic construct
  REGION 1..8: note = Synthetic
GFTFDDYA

SEQ ID NO: 439 - protein, 8 aa, synthetic construct
  REGION 1..8: note = Synthetic
ISWSSGSM

SEQ ID NO: 440 - protein, 14 aa, synthetic construct
  REGION 1..14: note = Synthetic
AKAREVGDYYGMDV

SEQ ID NO: 441 - DNA, 324 bp, synthetic construct; identical to SEQ ID NO: 411
  misc_feature 1..324: note = Synthetic
  source 1..324: mol_type = other DNA

SEQ ID NO: 442 - protein, 108 aa, synthetic construct; identical to SEQ ID NO: 412
  REGION 1..108: note = Synthetic

SEQ ID NO: 443 - protein, 6 aa, synthetic construct
  REGION 1..6: note = Synthetic
QSISSY

SEQ ID NO: 444 - skipped

SEQ ID NO: 445 - protein, 10 aa, synthetic construct
  REGION 1..10: note = Synthetic
QQSYSTPPIT

SEQ ID NO: 446 - DNA, 357 bp, synthetic construct
  misc_feature 1..357: note = Synthetic
  source 1..357: mol_type = other DNA
gaagtgcagctggtggagtctgggggaggcttggtacagcctggcaggtccctgacactctcctgtgcagcctctggattcacctttgataattttggcatgcactgggtccggcaaggtccagggaagggcctggaatgggtctcaggtcttacttggaatagtggtgtcataggctatgcggactctgtgaagggccgattcaccatctccagagacaacgccaagaactccctgtatctgcaaatgaacagtctgagacctgaggacacggccttatattactgtgcaaaagatatacggaattacggcccctttgactactggggccagggaaccctggtcaccgtctcctca

SEQ ID NO: 447 - protein, 119 aa, synthetic construct
  REGION 1..119: note = Synthetic
EVQLVESGGGLVQPGRSLTLSCAASGFTFDNFGMHWVRQGPGKGLEWVSGLTWNSGVIGYADSVKGRFTISRDNAKNSLYLQMNSLRPEDTALYYCAKDIRNYGPFDYWGQGTLVTVSS

SEQ ID NO: 448 - protein, 8 aa, synthetic construct
  REGION 1..8: note = Synthetic
GFTFDNFG

SEQ ID NO: 449 - protein, 8 aa, synthetic construct
  REGION 1..8: note = Synthetic
LTWNSGVI

SEQ ID NO: 450 - protein, 12 aa, synthetic construct
  REGION 1..12: note = Synthetic
AKDIRNYGPFDY

SEQ ID NO: 451 - DNA, 324 bp, synthetic construct
  misc_feature 1..324: note = Synthetic
  source 1..324: mol_type = other DNA
gaaattgtgttgacgcagtctccaggcaccctgtctttgtctccaggggaaagagccaccctctcctgcagggccagtcagagtgttagcagcagctacttagcctggtaccagcagaaacctggccaggctcccaggctcctcatctatggtgcatccagcagggccactggcatcccagacaggttcagtggcagtgggtctgggacagacttcactctcaccatcagcagactggagcctgaagattttgcagtgtattactgtcagcagtatggtagctcaccttggacgttcggccaagggaccaaggtggaaatcaaa

SEQ ID NO: 452 - protein, 108 aa, synthetic construct
  REGION 1..108: note = Synthetic
EIVLTQSPGTLSLSPGERATLSCRASQSVSSSYLAWYQQKPGQAPRLLIYGASSRATGIPDRFSGSGSGTDFTLTISRLEPEDFAVYYCQQYGSSPWTFGQGTKVEIK

SEQ ID NO: 453 - protein, 7 aa, synthetic construct
  REGION 1..7: note = Synthetic
QSVSSSY

SEQ ID NO: 454 - skipped

SEQ ID NO: 455 - protein, 9 aa, synthetic construct
  REGION 1..9: note = Synthetic
QQYGSSPWT

SEQ ID NO: 456 - DNA, 357 bp, synthetic construct
  misc_feature 1..357: note = Synthetic
  source 1..357: mol_type = other DNA
gaggtgcagctggtggagtctgggggaggcttagtacagcctggagggtccctaagactctcctgtgcagcctctggattcaccttcaatatttttgaaatgaactgggtccgccaggctccagggaaggggctggagtggatttcctacattagtagtcgtggaactaccacatactacgcagactctgtgaggggccgattcaccatctccagagacaacgccaagaactcactgtatctgcaaatgaacagcctgagagccgaggacacggctgtttattactgtgcgagagattatgaagcaacaatcccttttgacttctggggccagggaaccctggtcaccgtctcctca

SEQ ID NO: 457 - protein, 119 aa, synthetic construct
  REGION 1..119: note = Synthetic
EVQLVESGGGLVQPGGSLRLSCAASGFTFNIFEMNWVRQAPGKGLEWISYISSRGTTTYYADSVRGRFTISRDNAKNSLYLQMNSLRAEDTAVYYCARDYEATIPFDFWGQGTLVTVSS

SEQ ID NO: 458 - protein, 8 aa, synthetic construct
  REGION 1..8: note = Synthetic
GFTFNIFE

SEQ ID NO: 459 - protein, 8 aa, synthetic construct
  REGION 1..8: note = Synthetic
ISSRGTTT

SEQ ID NO: 460 - protein, 12 aa, synthetic construct
  REGION 1..12: note = Synthetic
ARDYEATIPFDF

SEQ ID NO: 461 - DNA, 324 bp, synthetic construct; identical to SEQ ID NO: 411
  misc_feature 1..324: note = Synthetic
  source 1..324: mol_type = other DNA

SEQ ID NO: 462 - protein, 108 aa, synthetic construct; identical to SEQ ID NO: 412
  REGION 1..108: note = Synthetic

SEQ ID NO: 463 - protein, 6 aa, synthetic construct
  REGION 1..6: note = Synthetic
QSISSY

SEQ ID NO: 464 - skipped

SEQ ID NO: 465 - protein, 10 aa, synthetic construct
  REGION 1..10: note = Synthetic
QQSYSTPPIT

SEQ ID NO: 466 - DNA, 363 bp, synthetic construct
  misc_feature 1..363: note = Synthetic
  source 1..363: mol_type = other DNA
gaggtgcagctggtggagtctgggggaagtgtggtacggcctggggggtccctgagactctcctgtgaagcctctggattcacctttgatgattatggcatgagctgggtccgccaagatccagggaaggggctggagtgggtctctggtattaattggaatggtgatagaacaaattatgcagactctgtgaagggccgattcatcatttccagagacaacgccaagaactctgtgtatctacaaatgaacagtctgagagcggaggactcggccttgtatcactgtgcgagagatcagggactcggagtggcagctacccttgactactggggccagggaaccctggtcaccgtctcctca

SEQ ID NO: 467 - protein, 121 aa, synthetic construct
  REGION 1..121: note = Synthetic
EVQLVESGGSVVRPGGSLRLSCEASGFTFDDYGMSWVRQDPGKGLEWVSGINWNGDRTNYADSVKGRFIISRDNAKNSVYLQMNSLRAEDSALYHCARDQGLGVAATLDYWGQGTLVTVSS

SEQ ID NO: 468 - protein, 8 aa, synthetic construct
  REGION 1..8: note = Synthetic
GFTFDDYG

SEQ ID NO: 469 - protein, 8 aa, synthetic construct
  REGION 1..8: note = Synthetic
INWNGDRT

SEQ ID NO: 470 - protein, 14 aa, synthetic construct
  REGION 1..14: note = Synthetic
ARDQGLGVAATLDY

SEQ ID NO: 471 - DNA, 324 bp, synthetic construct; identical to SEQ ID NO: 411
  misc_feature 1..324: note = Synthetic
  source 1..324: mol_type = other DNA

SEQ ID NO: 472 - protein, 108 aa, synthetic construct; identical to SEQ ID NO: 412
  REGION 1..108: note = Synthetic

SEQ ID NO: 473 - protein, 6 aa, synthetic construct
  REGION 1..6: note = Synthetic
QSISSY

SEQ ID NO: 474 - skipped

SEQ ID NO: 475 - protein, 10 aa, synthetic construct
  REGION 1..10: note = Synthetic
QQSYSTPPIT

SEQ ID NO: 476 - DNA, 384 bp, synthetic construct
  misc_feature 1..384: note = Synthetic
  source 1..384: mol_type = other DNA
gaggtgcagctggtggagtctgggggaggcttggtacagcctggagggtccctgagactctcctgtgcagcctctggattcaccgtcagtaattatgaaatgaactgggtccgccaggctccagggaaggggctggagtgggtttcatacattagtagtagtaccagtaacatatactacgcagactctgtgaagggccgattcaccatctccagagacaacgccgagaactcactgtatctgcagatgaacagcctgagagtcgaggacacggctgtttattactgtgtgagagatgggattgtagtagttccagttggtcgtggatactactattacggtttggacgtctggggccaagggaccacggtcaccgtctcctca

SEQ ID NO: 477 - protein, 128 aa, synthetic construct
  REGION 1..128: note = Synthetic
EVQLVESGGGLVQPGGSLRLSCAASGFTVSNYEMNWVRQAPGKGLEWVSYISSSTSNIYYADSVKGRFTISRDNAENSLYLQMNSLRVEDTAVYYCVRDGIVVVPVGRGYYYYGLDVWGQGTTVTVSS

SEQ ID NO: 478 - protein, 8 aa, synthetic construct
  REGION 1..8: note = Synthetic
GFTVSNYE

SEQ ID NO: 479 - protein, 8 aa, synthetic construct
  REGION 1..8: note = Synthetic
ISSSTSNI

SEQ ID NO: 480 - protein, 21 aa, synthetic construct
  REGION 1..21: note = Synthetic
VRDGIVVVPVGRGYYYYGLDV

SEQ ID NO: 481 - DNA, 324 bp, synthetic construct; identical to SEQ ID NO: 411
  misc_feature 1..324: note = Synthetic
  source 1..324: mol_type = other DNA

SEQ ID NO: 482 - protein, 108 aa, synthetic construct; identical to SEQ ID NO: 412
  REGION 1..108: note = Synthetic

SEQ ID NO: 483 - protein, 6 aa, synthetic construct
  REGION 1..6: note = Synthetic
QSISSY

SEQ ID NO: 484 - skipped

SEQ ID NO: 485 - protein, 10 aa, synthetic construct
  REGION 1..10: note = Synthetic
QQSYSTPPIT

SEQ ID NO: 486 - DNA, 378 bp, synthetic construct
  misc_feature 1..378: note = Synthetic
  source 1..378: mol_type = other DNA
caggtgcagctggtggagtctgggggaggcgtggtccagcctggaaggtccctgagactctcctgcgcagcctctggattcccctttagtaattatgtcatgtattgggtccgccaggctccaggcaaggggctggagtgggtggctcttattttttttgacggaaagaaaaactatcatgcagactccgtgaagggccgattcaccataaccagagacaattccaaaaatatgttatatctgcaaatgaacagcctgagacctgaggacgcggctgtgtattactgtgcgaaaatccattgtcctaatggtgtatgttacaaggggtattacggaatggacgtctggggccaagggaccacggtcaccgtctcctca

SEQ ID NO: 487 - protein, 126 aa, synthetic construct
  REGION 1..126: note = Synthetic
QVQLVESGGGVVQPGRSLRLSCAASGFPFSNYVMYWVRQAPGKGLEWVALIFFDGKKNYHADSVKGRFTITRDNSKNMLYLQMNSLRPEDAAVYYCAKIHCPNGVCYKGYYGMDVWGQGTTVTVSS

SEQ ID NO: 488 - protein, 8 aa, synthetic construct
  REGION 1..8: note = Synthetic
GFPFSNYV

SEQ ID NO: 489 - protein, 8 aa, synthetic construct
  REGION 1..8: note = Synthetic
IFFDGKKN

SEQ ID NO: 490 - protein, 19 aa, synthetic construct
  REGION 1..19: note = Synthetic
AKIHCPNGVCYKGYYGMDV

SEQ ID NO: 491 - DNA, 324 bp, synthetic construct; identical to SEQ ID NO: 411
  misc_feature 1..324: note = Synthetic
  source 1..324: mol_type = other DNA

SEQ ID NO: 492 - protein, 108 aa, synthetic construct; identical to SEQ ID NO: 412
  REGION 1..108: note = Synthetic

SEQ ID NO: 493 - protein, 6 aa, synthetic construct
  REGION 1..6: note = Synthetic
QSISSY

SEQ ID NO: 494 - skipped

SEQ ID NO: 495 - protein, 10 aa, synthetic construct
  REGION 1..10: note = Synthetic
QQSYSTPPIT

SEQ ID NO: 496 - DNA, 375 bp, synthetic construct
  misc_feature 1..375: note = Synthetic
  source 1..375: mol_type = other DNA
gaggtgcagctggtggagtctgggggaggcttggtccagcctggggggtccctaagactctcctgtgcagcctctggattcacctttagtaactattggatgaactgggtccgccaggctccagggaagggactggagtgggtggccaatataaaagaagatggaggtaagaaattgtatgtggactctgtgaagggccgattcaccatctccagagacaacgccaagaactcactgtttctgcaaatgaacagcctgagagccgaggacacggctgtgtattattgtgcgagagaagatacaactttggttgtggactactactactacggtatggacgtctggggccaagggaccacggtcaccgtctcctca

SEQ ID NO: 497 - protein, 125 aa, synthetic construct
  REGION 1..125: note = Synthetic
EVQLVESGGGLVQPGGSLRLSCAASGFTFSNYWMNWVRQAPGKGLEWVANIKEDGGKKLYVDSVKGRFTISRDNAKNSLFLQMNSLRAEDTAVYYCAREDTTLVVDYYYYGMDVWGQGTTVTVSS

SEQ ID NO: 498 - protein, 8 aa, synthetic construct
  REGION 1..8: note = Synthetic
GFTFSNYW

SEQ ID NO: 499 - protein, 8 aa, synthetic construct
  REGION 1..8: note = Synthetic
IKEDGGKK

SEQ ID NO: 500 - protein, 18 aa, synthetic construct
  REGION 1..18: note = Synthetic
AREDTTLVVDYYYYGMDV

SEQ ID NO: 501 - DNA, 324 bp, synthetic construct; identical to SEQ ID NO: 411
  misc_feature 1..324: note = Synthetic
  source 1..324: mol_type = other DNA

SEQ ID NO: 502 - protein, 108 aa, synthetic construct; identical to SEQ ID NO: 412
  REGION 1..108: note = Synthetic

SEQ ID NO: 503 - protein, 6 aa, synthetic construct
  REGION 1..6: note = Synthetic
QSISSY

SEQ ID NO: 504 - skipped

SEQ ID NO: 505 - protein, 10 aa, synthetic construct
  REGION 1..10: note = Synthetic
QQSYSTPPIT

SEQ ID NO: 506 - DNA, 366 bp, synthetic construct
  misc_feature 1..366: note = Synthetic
  source 1..366: mol_type = other DNA
caggtccagctggtgcagtctggggctgaggtgaagaagcctgggtcctcggtgaaggtctcctgcaaggcttctggaggcaccttcaacacctatgctatcacctgggtgcgacaggcccctggacaagggcttgaatggatggggggaatcatccctatctctggcatagcagagtacgcacagaagttccagggcagagtcacgatcaccacggatgactcctcgaccacagcctacatggaactgaacagtctgagatctgaggacacggccgtgtattactgtgcgagctggaactacgcactctactacttctacggtatggacgtctggggccgagggaccacggtcaccgtctcctca

SEQ ID NO: 507 - protein, 122 aa, synthetic construct
  REGION 1..122: note = Synthetic
QVQLVQSGAEVKKPGSSVKVSCKASGGTFNTYAITWVRQAPGQGLEWMGGIIPISGIAEYAQKFQGRVTITTDDSSTTAYMELNSLRSEDTAVYYCASWNYALYYFYGMDVWGRGTTVTVSS

SEQ ID NO: 508 - protein, 8 aa, synthetic construct
  REGION 1..8: note = Synthetic
GGTFNTYA

SEQ ID NO: 509 - protein, 8 aa, synthetic construct
  REGION 1..8: note = Synthetic
IIPISGIA

SEQ ID NO: 510 - protein, 15 aa, synthetic construct
  REGION 1..15: note = Synthetic
ASWNYALYYFYGMDV

SEQ ID NO: 511 - DNA, 324 bp, synthetic construct; identical to SEQ ID NO: 451
  misc_feature 1..324: note = Synthetic
  source 1..324: mol_type = other DNA

SEQ ID NO: 512 - protein, 108 aa, synthetic construct; identical to SEQ ID NO: 452
  REGION 1..108: note = Synthetic

SEQ ID NO: 513 - protein, 7 aa, synthetic construct
  REGION 1..7: note = Synthetic
QSVSSSY

SEQ ID NO: 514 - skipped

SEQ ID NO: 515 - protein, 9 aa, synthetic construct
  REGION 1..9: note = Synthetic
QQYGSSPWT

SEQ ID NO: 516 - DNA, 369 bp, synthetic construct
  misc_feature 1..369: note = Synthetic
  source 1..369: mol_type = other DNA
caggtgcagctggtggagtctgggggaggcttggtcaagcctggagggtccctgagactctcctgtgcagcctctggattcaccttcagtgtctattacatgaactggatccgccaggctccagggaagggcctggagtgggtttcatacattagtagtagtggtagtaccatatactacgcagactctgtgaagggccgattcaccatctccagggacaacgccaagaactcactgtatctccaaatgaacagtctgagagccgaggacacggccgtatattactgtgggagagaagggtatagtgggacttattcttattacggtatggacgtctggggccaagggaccacggtcaccgtctcctca

SEQ ID NO: 517 - protein, 123 aa, synthetic construct
  REGION 1..123: note = Synthetic
QVQLVESGGGLVKPGGSLRLSCAASGFTFSVYYMNWIRQAPGKGLEWVSYISSSGSTIYYADSVKGRFTISRDNAKNSLYLQMNSLRAEDTAVYYCGREGYSGTYSYYGMDVWGQGTTVTVSS

SEQ ID NO: 518 - protein, 8 aa, synthetic construct
  REGION 1..8: note = Synthetic
GFTFSVYY

SEQ ID NO: 519 - protein, 8 aa, synthetic construct
  REGION 1..8: note = Synthetic
ISSSGSTI

SEQ ID NO: 520 - protein, 16 aa, synthetic construct
  REGION 1..16: note = Synthetic
GREGYSGTYSYYGMDV

SEQ ID NO: 521 - DNA, 336 bp, synthetic construct
  misc_feature 1..336: note = Synthetic
  source 1..336: mol_type = other DNA
gatattgtgatgactcagtctccactctccctgcccgtcacccctggagagccggcctccatctcctgcaggtctagtcagagcctcctgcatagtaatggatacaactatttggattggtacctgcagaagccagggcagtctccacagttcctgatctatttgggttctaatcgggcctccggggtccctgacaggttcagtggcagtggatcaggcacagattttacactgaaaatcaacagagtggaggctgaggatgttggggtttattactgcatgcaagctctacaaactccgtacacttttggccaggggaccaagctggagatcaaa

SEQ ID NO: 522 - protein, 112 aa, synthetic construct
  REGION 1..112: note = Synthetic
DIVMTQSPLSLPVTPGEPASISCRSSQSLLHSNGYNYLDWYLQKPGQSPQFLIYLGSNRASGVPDRFSGSGSGTDFTLKINRVEAEDVGVYYCMQALQTPYTFGQGTKLEIK

SEQ ID NO: 523 - protein, 11 aa, synthetic construct
  REGION 1..11: note = Synthetic
QSLLHSNGYNY

SEQ ID NO: 524 - skipped

SEQ ID NO: 525 - protein, 9 aa, synthetic construct
  REGION 1..9: note = Synthetic
MQALQTPYT

SEQ ID NO: 526 - DNA, 366 bp, synthetic construct
  misc_feature 1..366: note = Synthetic
  source 1..366: mol_type = other DNA
gaagtgcagctggtggagtctgggggagggttggtacagcctggcaggtccctgagactctcctgtgcagtctctggattcacctttgatgattatgccatgcactgggtccggcaagctccagggaagggcctggagtgggtctcaggtattagttggaatagtggtaccagaggatatgcggactctgtgaagggccgattcaccatctccagagacaacgccaagaactccctgtatctgcaaatgaacagtctgagaggtgaggacacggccttgtattactgtgtaaaagatattacgatatcccccaactactacggtatggacgtctggggccaagggaccacggtcaccgtctcctca

SEQ ID NO: 527 - protein, 122 aa, synthetic construct
  REGION 1..122: note = Synthetic
EVQLVESGGGLVQPGRSLRLSCAVSGFTFDDYAMHWVRQAPGKGLEWVSGISWNSGTRGYADSVKGRFTISRDNAKNSLYLQMNSLRGEDTALYYCVKDITISPNYYGMDVWGQGTTVTVSS

SEQ ID NO: 528 - protein, 8 aa, synthetic construct
  REGION 1..8: note = Synthetic
GFTFDDYA

SEQ ID NO: 529 - protein, 8 aa, synthetic construct
  REGION 1..8: note = Synthetic
ISWNSGTR

SEQ ID NO: 530 - protein, 15 aa, synthetic construct
  REGION 1..15: note = Synthetic
VKDITISPNYYGMDV

SEQ ID NO: 531 - DNA, 321 bp, synthetic construct
  misc_feature 1..321: note = Synthetic
  source 1..321: mol_type = other DNA
gacatccagatgacccagtctccatcctccctgtctgcatctgtaggagacagagtcaccatcacttgccgggcgagtcaggacattagccattattcagcctggtatcagcagaaaccagggaaacttcctaacctcctgatctatgctgcatccactttgcaatcaggggtcccatctcggttcagtggcagtggatctgggacagatttctctctcaccaccagcagcctgcagcctgaagatgttgcaacttattactgtcaaaagtataacagtgtccctctcactttcggcggagggaccaaggtggagatcaaa

SEQ ID NO: 532 - protein, 107 aa, synthetic construct
  REGION 1..107: note = Synthetic
DIQMTQSPSSLSASVGDRVTITCRASQDISHYSAWYQQKPGKLPNLLIYAASTLQSGVPSRFSGSGSGTDFSLTTSSLQPEDVATYYCQKYNSVPLTFGGGTKVEIK

SEQ ID NO: 533 - protein, 6 aa, synthetic construct
  REGION 1..6: note = Synthetic
QDISHY

SEQ ID NO: 534 - skipped

SEQ ID NO: 535 - protein, 9 aa, synthetic construct
  REGION 1..9: note = Synthetic
QKYNSVPLT

SEQ ID NO: 536 - protein, 118 aa, synthetic construct
  REGION 1..118: note = Synthetic
EVQLVESGGGLVQPGNSLTLSCVASGFTFSNYGMHWIRQAPKKGLEWIAMIYYDSSKMNYADTVKGRFTISRDNSKNTLYLEMNSLRSEDTAMYYCAVPTSHYVVDVWGQGVSVTVSS

SEQ ID NO: 537 - protein, 107 aa, synthetic construct
  REGION 1..107: note = Synthetic
DIQMTQSPASLSASLEEIVTITCQASQDIGNWLAWYQQKPGKSPQLLIYGATSLADGVPSRFSGSRSGTQFSLKISRVQVEDIGIYYCLQAYNTPWTFGGGTKLELK

SEQ ID NO: 538 - protein, 243 aa, synthetic construct
  REGION 1..243: note = Synthetic
DIQMTQSPSSLSASVGDRVTITCRASQGIRDHFGWYQQKPGKAPKRLIYAASSLHSGVPSRFSGSGSGTEFTLTISSLQPEDFATYYCLQYDTYPLTFGGGTKVEIKGGGGSGGGGSGGGGSEVQLVESGGGLVQPGGSLRLSCATSGFTFTSYDMKWVRQAPGLGLEWVSAISGSGGNTYYADSVKGRFTISRDNSRNTLYLQMNSLRAEDTAVYYCTRSHDFGAFDYFDYWGQGTLVTVSS

SEQ ID NO: 539 - protein, 245 aa, synthetic construct
  REGION 1..245: note = Synthetic
EIVMTQSPATLSVSPGERATLSCRASQTVSSNLAWYQQKPGQAPRLLIYGSSSRATGIPARFSGSGSGTEFTLTISSLQSEDFAVYYCQQYNNWPPYTFGQGTKLEIKGGGGSGGGGSGGGGSEVQLVESGGDLVQPGRSLRLSCAASGFTFDDYAMHWVRQAPGKGLEWVSGISWNSATRVYADSVKGRFTISRDNAKNFLYLQMNSLRSEDTALYHCAKDMDISLGYYGLDVWGQGTTVTVSS

SEQ ID NO: 540 - protein, 246 aa, synthetic construct
  REGION 1..246: note = Synthetic
DIQMTQSPSSVSASVGDRVTITCRASQGIASWLAWYQQKPGKAPELLIYAASSLQGGVPSRFSGSGSGTDFTLTISSLQPEDFAIYYCQQANYFPWTFGQGTKVEIKGGGGSGGGGSGGGGSQITLKESGPTLVKPTQTLTLTCTFSGFSLSTSGVGVVWIRQPPGKALEWLALIYWNDHKRYSPSLGSRLTITKDTSKNQVVLTMTNMDPVDTATYYCAHYSGSYSYYYYGLDVWGQGTTVTVSS

SEQ ID NO: 541 - protein, 243 aa, synthetic construct
  REGION 1..243: note = Synthetic
DIQMTQSPSSLSASVGDRVTITCRASQGIRTDLGWYQQKPGKAPKRLIYAASSLQSGVPSRFSGSGSGTEFTLTISSLRPEDFATFYCLQYNSYPLTFGGGTKVEIKGGGGSGGGGSGGGGSEVQLLESGGALVQPGGSLRLSCAASGFTFTSYAMHWVRQAPGKGLEWVSSIRGSGGGTYSADSVKGRFTISRDNSRDTLYLQMNSVRAEDTAVYYCARSHDYGAFDFFDYWGQGTLVTVSS

SEQ ID NO: 542 - protein, 238 aa, synthetic construct
  REGION 1..238: note = Synthetic
EIVMTQSPATLSVSPGERATLSCRASQSVSINLAWYQQKPGQAPRLLIFVASTRATGIPARFSGSGSGTEFTLTISSLQSEDFATYYCQQYDIWPYTFGQGTKLEIKGGGGSGGGGSGGGGSQVQLVESGGGLVKPGGSLRLSCAASGFTFSDYFMSWIRQAPGKGLEWVSYISSTGSTINYADSVKGRFTISRDNVKNSLYLQMTSLRVEDTAVYYCTRDNWNYEYWGQGTLVTVSS

SEQ ID NO: 543 - protein, 245 aa, synthetic construct
  REGION 1..245: note = Synthetic
DIQMTQSPSSLSASVGDRVTINCRASQGIRNDLGWYQQKPGKAPKRLIYAASSLQSGVPLRFSGSGSGTEFTLTINNLQPEDFATYYCLSHNSYPWTFGQGTKVEIKGGGGSGGGGSGGGGSQLQLQESGPGLVKPSETLSLTCTVSGESISSNTYYWGWIRQPPGKGLEWIGSIDYSGTTNYNPSLKSRVTISVDTSRNHFSLRLRSVTAADTAVYYCAREWGNYGYYYGMDVWGQGTTVTVSS

SEQ ID NO: 544 - protein, 240 aa, synthetic construct
  REGION 1..240: note = Synthetic
DIQMTQSPPSVSASVGDRVTITCRASQGISSWLAWYQQKPGKAPKLLIYAASSLQSGVPSRFSGSGSGTDFTLTISSLQPEDFATYYCQQANSFPRTFGQGTKVEIKGGGGSGGGGSGGGGSQVQLVQSGAEVKKPGSSVRVSCKASRGTFSSYAISWVRQAPGQGLEWMGGIIPIFGTANYAQKFLARVTITADESTSTAYMELSSLRSEDTAVYYCAREKGWNYFDYWGQGTLVTVSS

SEQ ID NO: 545 - protein, 250 aa, synthetic construct
  REGION 1..250: note = Synthetic
DIVMTQSPLSLPVTPGEPASISCRSSQSLLHGNGYNYLTWYLQKPGQSPQLLIYLGSNRASGVPDRFSGSGSGTDFTLKISRVEAEDVGVYYCMQALQTPYTFGQGTKLEIKGGGGSGGGGSGGGGSQVQLVESGGGLVKPGGSLRLSCAASGFTFSDYYMNWIRQAPGKGLEWVSYISSSGTTIYYADSVKGRFTISRDNAKKSLYLEMNSLRAEDTAVYYCAREGYGNDYYYYGIDVWGQGTTVTVSS

SEQ ID NO: 546 - protein, 245 aa, synthetic construct
  REGION 1..245: note = Synthetic
DIQMTQSPSSLSASVGDRVTITCRASQSISSYLNWYQQKPGKAPKLLIYAASSLQSGVPSRFSGSGSGTDFTLTISSLQPEDFATYYCQQSYSTPPITFGQGTRLEIKGGGGSGGGGSGGGGSQVQLVESGGGVVQPGRSLRLSCAASGFTFSSFGMHWVRQAPGKGLEWVIFISYDGSDKYYADSVKGRFAISRDSSKNTLYLQMNSLRAEDTAVYYCAKENGILTDSYGMDVWGQGTTVTVSS

SEQ ID NO: 547 - protein, 247 aa, synthetic construct
  REGION 1..247: note = Synthetic
DIQMTQSPSSLSASVGDRVTITCRASQSISSYLNWYQQKPGKAPKLLIYAASSLQSGVPSRFSGSGSGTDFTLTISSLQPEDFATYYCQQSYSTPPITFGQGTRLEIKGGGGSGGGGSGGGGSQVQLVQSGAEVKKPGASVKVSCKASGYTFTSYGISWVRQAPGQGLEWMGWISVYHGNTNYAQKFQGRVTMTTDTSTSTAYMELRSLRSDDTAVYYCAREGYYDFWSGYYPFDYWGQGTLVTVSS

SEQ ID NO: 548 - protein, 241 aa, synthetic construct
  REGION 1..241: note = Synthetic
DIQMTQSPSSLSASVGDRVTITCRASQSISSYLNWYQQKPGKAPKLLIYAASSLQSGVPSRFSGSGSGTDFTLTISSLQPEDFATYYCQQSYSTPPITFGQGTRLEIKGGGGSGGGGSGGGGSEVQLVESGGGLIQPGGSLRLSCEASGFTFRNYEMNWVRQAPGKGLEWVSYISSSGNMKDYAESVKGRFTISRDNVKNSLQLQMNSLRVEDTAVYYCARDEFPYGMDVWGQGTTVTVSS

SEQ ID NO: 549 - protein, 249 aa, synthetic construct
  REGION 1..249: note = Synthetic
DIQMTQSPSSLSASVGDRVTITCRASQSISSYLNWYQQKPGKAPKLLIYAASSLQSGVPSRFSGSGSGTDFTLTISSLQPEDFATYYCQQSYSTPPITFGQGTRLEIKGGGGSGGGGSGGGGSQVQLVESGGGVVQPGRSLRLSCAASGFPFSNYVMYWVRQAPGKGLEWVALIFFDGKKNYHADSVKGRFTITRDNSKNMLYLQMNSLRPEDAAVYYCAKIHCPNGVCYKGYYGMDVWGQGTTVTVSS

SEQ ID NO: 550 - protein, 248 aa, synthetic construct
  REGION 1..248: note = Synthetic
DIQMTQSPSSLSASVGDRVTITCRASQSISSYLNWYQQKPGKAPKLLIYAASSLQSGVPSRFSGSGSGTDFTLTISSLQPEDFATYYCQQSYSTPPITFGQGTRLEIKGGGGSGGGGSGGGGSEVQLVESGGGLVQPGGSLRLSCAASGFTFSNYWMNWVRQAPGKGLEWVANIKEDGGKKLYVDSVKGRFTISRDNAKNSLFLQMNSLRAEDTAVYYCAREDTTLVVDYYYYGMDVWGQGTTVTVSS

SEQ ID NO: 551 - protein, 242 aa, synthetic construct
  REGION 1..242: note = Synthetic
DIQMTQSPSSLSASVGDRVTITCRASQSISSYLNWYQQKPGKAPKLLIYAASSLQSGVPSRFSGSGSGTDFTLTISSLQPEDFATYYCQQSYSTPPITFGQGTRLEIKGGGGSGGGGSGGGGSEVQLVESGGGLVQPGGSLRLSCAASGFTFNIFEMNWVRQAPGKGLEWISYISSRGTTTYYADSVRGRFTISRDNAKNSLYLQMNSLRAEDTAVYYCARDYEATIPFDFWGQGTLVTVSS

SEQ ID NO: 552 - protein, 244 aa, synthetic construct
  REGION 1..244: note = Synthetic
DIQMTQSPSSLSASVGDRVTITCRASQSISSYLNWYQQKPGKAPKLLIYAASSLQSGVPSRFSGSGSGTDFTLTISSLQPEDFATYYCQQSYSTPPITFGQGTRLEIKGGGGSGGGGSGGGGSEVQLVESGGSVVRPGGSLRLSCEASGFTFDDYGMSWVRQDPGKGLEWVSGINWNGDRTNYADSVKGRFIISRDNAKNSVYLQMNSLRAEDSALYHCARDQGLGVAATLDYWGQGTLVTVSS

SEQ ID NO: 553 - protein, 251 aa, synthetic construct
  REGION 1..251: note = Synthetic
DIQMTQSPSSLSASVGDRVTITCRASQSISSYLNWYQQKPGKAPKLLIYAASSLQSGVPSRFSGSGSGTDFTLTISSLQPEDFATYYCQQSYSTPPITFGQGTRLEIKGGGGSGGGGSGGGGSEVQLVESGGGLVQPGGSLRLSCAASGFTVSNYEMNWVRQAPGKGLEWVSYISSSTSNIYYADSVKGRFTISRDNAENSLYLQMNSLRVEDTAVYYCVRDGIVVVPVGRGYYYYGLDVWGQGTTVTVSS

SEQ ID NO: 554 - protein, 244 aa, synthetic construct
  REGION 1..244: note = Synthetic
DIQMTQSPSSLSASVGDRVTITCRASQSISSYLNWYQQKPGKAPKLLIYAASSLQSGVPSRFSGSGSGTDFTLTISSLQPEDFATYYCQQSYSTPPITFGQGTRLEIKGGGGSGGGGSGGGGSEVQLVESGGGLVQPGRSLRLSCAASGFTFDDYAMNWVRQAPGKGLEWVSGISWSSGSMDYADSVKGRFTISRDNAKNSLYLQMNSLRTEDTALYYCAKAREVGDYYGMDVWGQGTTVTVSS

SEQ ID NO: 555 - protein, 242 aa, synthetic construct
  REGION 1..242: note = Synthetic
EIVLTQSPGTLSLSPGERATLSCRASQSVSSSYLAWYQQKPGQAPRLLIYGASSRATGIPDRFSGSGSGTDFTLTISRLEPEDFAVYYCQQYGSSPWTFGQGTKVEIKGGGGSGGGGSGGGGSEVQLVESGGGLVQPGRSLTLSCAASGFTFDNFGMHWVRQGPGKGLEWVSGLTWNSGVIGYADSVKGRFTISRDNAKNSLYLQMNSLRPEDTALYYCAKDIRNYGPFDYWGQGTLVTVSS

SEQ ID NO: 556 - protein, 245 aa, synthetic construct
  REGION 1..245: note = Synthetic
EIVLTQSPGTLSLSPGERATLSCRASQSVSSSYLAWYQQKPGQAPRLLIYGASSRATGIPDRFSGSGSGTDFTLTISRLEPEDFAVYYCQQYGSSPWTFGQGTKVEIKGGGGSGGGGSGGGGSQVQLVQSGAEVKKPGSSVKVSCKASGGTFNTYAITWVRQAPGQGLEWMGGIIPISGIAEYAQKFQGRVTITTDDSSTTAYMELNSLRSEDTAVYYCASWNYALYYFYGMDVWGRGTTVTVSS

SEQ ID NO: 557 - protein, 243 aa, synthetic construct
  REGION 1..243: note = Synthetic
DIQMTQSPSSLSASIGDRVTITCRASQGISNYLAWYQQKPGKVPKLLIYAASTLQSGVPSRFSGSGSGTDFTLTISSLQPEDVATYYCQNHNSVPLTFGGGTKVEIKGGGGSGGGGSGGGGSEVQLVESGGGLVQPGGSLRLSCAASGFTFNSYAMTWVRQAPGKGLEWVSFIGGSTGNTYYAGSVKGRFTISSDNSKKTLYLQMNSLRAEDTAVYYCAKGGAARRMEYFQHWGQGTLVTVSS

SEQ ID NO: 558 - protein, 243 aa, synthetic construct
  REGION 1..243: note = Synthetic
DIQMTQSPSSLSASVGDRVTITCRASQGISNYLAWYQQKPGKVPNLLIYAASTLQSGVPSRFSGSGSGTDFTLTISSLQPEDVATYYCQKYNSAPLTFGGGTKVEIKGGGGSGGGGSGGGGSEVQLVESGGGLVQPGGSLRLSCAASGFAFSSYAMTWVRQAPGKGLEWVSVISGTGGSTYYADSVKGRFTISRDNSKNTLYLQMNSLRAEDTAVYYCAKGGAARRMEYFQYWGQGTLVTVSS

SEQ ID NO: 559 - protein, 250 aa, synthetic construct
  REGION 1..250: note = Synthetic
DIVMTQSPLSLPVTPGEPASISCRSSQSLLHSNGYNYLDWYLQKPGQSPQFLIYLGSNRASGVPDRFSGSGSGTDFTLKINRVEAEDVGVYYCMQALQTPYTFGQGTKLEIKGGGGSGGGGSGGGGSQVQLVESGGGLVKPGGSLRLSCAASGFTFSVYYMNWIRQAPGKGLEWVSYISSSGSTIYYADSVKGRFTISRDNAKNSLYLQMNSLRAEDTAVYYCGREGYSGTYSYYGMDVWGQGTTVTVSS

SEQ ID NO: 560 - protein, 244 aa, synthetic construct
  REGION 1..244: note = Synthetic
DIQMTQSPSSLSASVGDRVTITCRASQDISHYSAWYQQKPGKLPNLLIYAASTLQSGVPSRFSGSGSGTDFSLTTSSLQPEDVATYYCQKYNSVPLTFGGGTKVEIKGGGGSGGGGSGGGGSEVQLVESGGGLVQPGRSLRLSCAVSGFTFDDYAMHWVRQAPGKGLEWVSGISWNSGTRGYADSVKGRFTISRDNAKNSLYLQMNSLRGEDTALYYCVKDITISPNYYGMDVWGQGTTVTVSS

SEQ ID NO: 561 - protein, 239 aa, synthetic construct
  REGION 1..239: note = Synthetic
DIQMTQSPSSLSASVGDRVTITCRASQSIDRYLNWYRQKPGKAPKLLIYTTSSLQSGVPSRFSGSGSGTDFTLTLSSLQPEDFATYYCQQSYSPPLTFGGGTKVEIKGGGGSGGGGSGGGGSQVQLVESGGGVVQPGRSLRLSCAASGFTFSSYGMHWVRQAPGKGLEWVAVIWYDGSNKYYADSVKGRFTISRDISKNTLYLQMNSLRAEDTAVYYCAGQLDLFFDYWGQGTLVTVSS

SEQ ID NO: 562 - protein, 247 aa, synthetic construct
  REGION 1..247: note = Synthetic
DIQMTQSPSSVSASVGDRVTITCRASQGISSWLAWYQQKPGKAPKLLIYAASSLQSGVPSRFSGSGSGTDFTLTISSLQPEDFATYYCQKADSLPYAFGQGTKLEIKGGGGSGGGGSGGGGSEVQLVESGGGLVQPGGSLRLSCTASGFTFSNYWMTWVRQAPGKGLEWVANIKEDGSEKEYVDSVKGRFTISRDNAKNSLYLQMNSLRGEDTAVYYCARDGEQLVDYYYYYVMDVWGQGTTVTVSS

SEQ ID NO: 563 - protein, 249 aa, synthetic construct
  REGION 1..249: note = Synthetic
DIQMTQSPSSLSASVGDRVTITCRASQSISSYLNWYQQKPGKAPKVLIYAASSLQSGVPSRFSGSGSGTDFTLTISSLQPEDFATYYCQQSYSIPLTFGGGTKVEIKGGGGSGGGGSGGGGSEVQLVESGGGLVQPGRSLRLSCAASGFTFDDYAMHWVRQAPGKGLEWVSGISWNSGYIGYADSVKGRFTISRDNAENSLHLQMNSLRAEDTALYYCARGGSTLVRGVKGGYYGMDVWGQGTTVTVSS

SEQ ID NO: 564 - protein, 238 aa, synthetic construct
  REGION 1..238: note = Synthetic
EIVMTQSPATLSVSPGERATLSCRASQSVSSNFAWYQQKPGQAPRLLIYSASSRATGIPVRFSGSGSGTEFTLTISSLQSEDFAVYYCQQYNIWPRTFGQGTKVEIKGGGGSGGGGSGGGGSEVQLVESGGGLVQPGGSLRLSCAVSGFIFSSYEMNWVRQAPGKGLEWVSYISSSGSTIFYADSVKGRFTISRDNAKNSLYLQMNSLRAEDTAVYYCVSGVVLFDVWGQGTMVTVSS

SEQ ID NO: 565 - protein, 247 aa, synthetic construct
  REGION 1..247: note = Synthetic
DIQMTQSPSSVSASVGDRVTITCRASQGISSWLAWYQQKPGKAPKLLIYAASSLQSGVPSRFSGSGSGTDFTLTISSLQPEDFATYYCQKANSFPYTFGQGTKLEIKGGGGSGGGGSGGGGSEVQLVESGGGLVQPGGSLRLSCAASGFTFSNYWMTWVRQAPGKGLEWVANIKEDGSEKDYVDSVKGRFTISRDNAKNSLYLQMNSLRGEDTAVYYCARDGEQLVDYYYYYVMDVWGQGTTVTVSS

SEQ ID NO: 566 - protein, 242 aa, synthetic construct
  REGION 1..242: note = Synthetic
DIQLTQSPSSLSASVGDRVTITCWASQGISSYLAWYQQKPGKAPKLLIYAASTLQSGVPSRFSGSGSGTEFTLTISSLQPEDFATYYCQQLNSYPLTFGGGTKVEIKGGGGSGGGGSGGGGSQVQLVESGGGVVQPGRSLRLSCIASGFTFSVYGIHWVRQAPGKGLEWMAVISHDGNIKHYADSVKGRFTISRDNSKNTLYLQINSLRTEDTAVYYCAKDTWNSLDTFDIWGQGTMVTVSS

SEQ ID NO: 567 - protein, 242 aa, synthetic construct
  REGION 1..242: note = Synthetic
AIQMTQSPSSLSASVGDRVTITCRASQGIRNDLGWYQQKPGKAPKLLIYAASTLQSGVPSRFSGSGSGTDFTLTISSLQPEDFATYYCLQDYNYPFTFGPGTKVDIKGGGGSGGGGSGGGGSQVTLRESGPALVKPSQTLTLTCTFSGFSLNTYGMFVSWIRQPPGKALEWLAHIHWDDDKYYSTSLKTRLTISKDTSKNQVVLTMTNMDPVDTATYYCARGHNNLNYIIHWGQGTLVTVSS

SEQ ID NO: 568 - protein, 245 aa, synthetic construct
  REGION 1..245: note = Synthetic
EIVLTQSPATLSLSPGERATLSCRASQSVSSYLAWYQQKPGQAPRLLIHDVSNRATGIPARFSGSGSGTDFTLTISSLEPEDFVVYYCQQRSDWPITFGQGTRLEIKGGGGSGGGGSGGGGSEVQLVESGGGLVQPGRSLRLSCAASGFTFDDKAMHWVRQVPGKGLEWISGISWNSGTIGYADSVKGRFIISRDNAKNSLYLQMNSLRAEDTALYYCAKDGDTSGWYWYGLDVWGQGTTVTVSS

SEQ ID NO: 569 - protein, 244 aa, synthetic construct
  REGION 1..244: note = Synthetic
DIQMTQSPSSLSASVGDRVTITCRASQSIRNVLGWFQQKPGKAPQRLIYAASSLQSGVPSRFSGSGSGTEFTLTISSLQPEDFATYYCLQHNFYPLTFGGGTKVEIKGGGGSGGGGSGGGGSQVQLVESGGGVVQPGRSLRLSCAASGFTFTTYGMHWVRQAPGKGLEWVAVIWYDGSNKYYGDSVKGRFTISRDNSKNTLYLQMNSLRVDDTAVYYCTRTHGYTRSSDGFDYWGQGTLVTVSS

SEQ ID NO: 570 - protein, 1139 aa, synthetic construct
  REGION 1..1139: note = Synthetic
DIQMTQSPSSVSASVGDRVTITCRASQGIASWLAWYQQKPGKAPELLIYAASSLQGGVPSRFSGSGSGTDFTLTISSLQPEDFAIYYCQQANYFPWTFGQGTKVEIKGGGGSGGGGSGGGGSQITLKESGPTLVKPTQTLTLTCTFSGFSLSTSGVGVVWIRQPPGKALEWLALIYWNDHKRYSPSLGSRLTITKDTSKNQVVLTMTNMDPVDTATYYCAHYSGSYSYYYYGLDVWGQGTTVTVSSGGGGSGGGGSAHPGRPRAVPTQCDVPPNSRFDCAPDKAITQEQCEARGCCYIPAKQGLQGAQMGQPWCFFPPSYPSYKLENLSSSEMGYTATLTRTTPTFFPKDILTLRLDVMMETENRLHFTIKDPANRRYEVPLETPHVHSRAPSPLYSVEFSEEPFGVIVRRQLDGRVLLNTTVAPLFFADQFLQLSTSLPSQYITGLAEHLSPLMLSTSWTRITLWNRDLAPTPGANLYGSHPFYLALEDGGSAHGVFLLNSNAMDVVLQPSPALSWRSTGGILDVYIFLGPEPKSVVQQYLDVVGYPFMPPYWGLGFHLCRWGYSSTAITRQVVENMTRAHFPLDVQWNDLDYMDSRRDFTFNKDGFRDFPAMVQELHQGGRRYMMIVDPAISSSGPAGSYRPYDEGLRRGVFITNETGQPLIGKVWPGSTAFPDFTNPTALAWWEDMVAEFHDQVPFDGMWIDMNEPSNFIRGSEDGCPNNELENPPYVPGVVGGTLQAATICASSHQFLSTHYNLHNLYGLTEAIASHRALVKARGTRPFVISRSTFAGHGRYAGHWTGDVWSSWEQLASSVPEILQFNLLGVPLVGADVCGFLGNTSEELCVRWTQLGAFYPFMRNHNSLLSLPQEPYSFSEPAQQAMRKALTLRYALLPHLYTLFHQAHVAGETVARPLFLEFPKDSSTWTVDHQLLWGEALLITPVLQAGKAEVTGYFPLGTWYDLQTVPVEALGSLPPPPAAPREPAIHSEGQWVTLPAPLDTINVHLRAGYIIPLQGPGLTTTESRQQPMALAVALTKGGEARGELFWDDGESLEVLERGAYTQVIFLARNNTIVNELVRVTSEGAGLQLQKVTVLGVATAPQQVLSNGVPVSNFTYSPDTKVLDICVSLLMGEQFLVSWC

SEQ ID NO: 571 - protein, 1142 aa, synthetic construct
  REGION 1..1142: note = Synthetic
DIQMTQSPSSLSASVGDRVTITCRASQSISSYLNWYQQKPGKAPKLLIYAASSLQSGVPSRFSGSGSGTDFTLTISSLQPEDFATYYCQQSYSTPPITFGQGTRLEIKGGGGSGGGGSGGGGSQVQLVESGGGVVQPGRSLRLSCAASGFPFSNYVMYWVRQAPGKGLEWVALIFFDGKKNYHADSVKGRFTITRDNSKNMLYLQMNSLRPEDAAVYYCAKIHCPNGVCYKGYYGMDVWGQGTTVTVSSGGGGSGGGGSAHPGRPRAVPTQCDVPPNSRFDCAPDKAITQEQCEARGCCYIPAKQGLQGAQMGQPWCFFPPSYPSYKLENLSSSEMGYTATLTRTTPTFFPKDILTLRLDVMMETENRLHFTIKDPANRRYEVPLETPHVHSRAPSPLYSVEFSEEPFGVIVRRQLDGRVLLNTTVAPLFFADQFLQLSTSLPSQYITGLAEHLSPLMLSTSWTRITLWNRDLAPTPGANLYGSHPFYLALEDGGSAHGVFLLNSNAMDVVLQPSPALSWRSTGGILDVYIFLGPEPKSVVQQYLDVVGYPFMPPYWGLGFHLCRWGYSSTAITRQVVENMTRAHFPLDVQWNDLDYMDSRRDFTFNKDGFRDFPAMVQELHQGGRRYMMIVDPAISSSGPAGSYRPYDEGLRRGVFITNETGQPLIGKVWPGSTAFPDFTNPTALAWWEDMVAEFHDQVPFDGMWIDMNEPSNFIRGSEDGCPNNELENPPYVPGVVGGTLQAATICASSHQFLSTHYNLHNLYGLTEAIASHRALVKARGTRPFVISRSTFAGHGRYAGHWTGDVWSSWEQLASSVPEILQFNLLGVPLVGADVCGFLGNTSEELCVRWTQLGAFYPFMRNHNSLLSLPQEPYSFSEPAQQAMRKALTLRYALLPHLYTLFHQAHVAGETVARPLFLEFPKDSSTWTVDHQLLWGEALLITPVLQAGKAEVTGYFPLGTWYDLQTVPVEALGSLPPPPAAPREPAIHSEGQWVTLPAPLDTINVHLRAGYIIPLQGPGLTTTESRQQPMALAVALTKGGEARGELFWDDGESLEVLERGAYTQVIFLARNNTIVNELVRVTSEGAGLQLQKVTVLGVATAPQQVLSNGVPVSNFTYSPDTKVLDICVSLLMGEQFLVSWC

SEQ ID NO: 572 - protein, 1135 aa, synthetic construct
  REGION 1..1135: note = Synthetic
DIQMTQSPSSLSASVGDRVTITCRASQSISSYLNWYQQKPGKAPKLLIYAASSLQSGVPSRFSGSGSGTDFTLTISSLQPEDFATYYCQQSYSTPPITFGQGTRLEIKGGGGSGGGGSGGGGSEVQLVESGGGLVQPGGSLRLSCAASGFTFNIFEMNWVRQAPGKGLEWISYISSRGTTTYYADSVRGRFTISRDNAKNSLYLQMNSLRAEDTAVYYCARDYEATIPFDFWGQGTLVTVSSGGGGSGGGGSAHPGRPRAVPTQCDVPPNSRFDCAPDKAITQEQCEARGCCYIPAKQGLQGAQMGQPWCFFPPSYPSYKLENLSSSEMGYTATLTRTTPTFFPKDILTLRLDVMMETENRLHFTIKDPANRRYEVPLETPHVHSRAPSPLYSVEFSEEPFGVIVRRQLDGRVLLNTTVAPLFFADQFLQLSTSLPSQYITGLAEHLSPLMLSTSWTRITLWNRDLAPTPGANLYGSHPFYLALEDGGSAHGVFLLNSNAMDVVLQPSPALSWRSTGGILDVYIFLGPEPKSVVQQYLDVVGYPFMPPYWGLGFHLCRWGYSSTAITRQVVENMTRAHFPLDVQWNDLDYMDSRRDFTFNKDGFRDFPAMVQELHQGGRRYMMIVDPAISSSGPAGSYRPYDEGLRRGVFITNETGQPLIGKVWPGSTAFPDFTNPTALAWWEDMVAEFHDQVPFDGMWIDMNEPSNFIRGSEDGCPNNELENPPYVPGVVGGTLQAATICASSHQFLSTHYNLHNLYGLTEAIASHRALVKARGTRPFVISRSTFAGHGRYAGHWTGDVWSSWEQLASSVPEILQFNLLGVPLVGADVCGFLGNTSEELCVRWTQLGAFYPFMRNHNSLLSLPQEPYSFSEPAQQAMRKALTLRYALLPHLYTLFHQAHVAGETVARPLFLEFPKDSSTWTVDHQLLWGEALLITPVLQAGKAEVTGYFPLGTWYDLQTVPVEALGSLPPPPAAPREPAIHSEGQWVTLPAPLDTINVHLRAGYIIPLQGPGLTTTESRQQPMALAVALTKGGEARGELFWDDGESLEVLERGAYTQVIFLARNNTIVNELVRVTSEGAGLQLQKVTVLGVATAPQQVLSNGVPVSNFTYSPDTKVLDICVSLLMGEQFLVSWC

SEQ ID NO: 573 - protein, 1137 aa, synthetic construct
  REGION 1..1137: note = Synthetic
DIQMTQSPSSLSASVGDRVTITCRASQSISSYLNWYQQKPGKAPKLLIYAASSLQSGVPSRFSGSGSGTDFTLTISSLQPEDFATYYCQQSYSTPPITFGQGTRLEIKGGGGSGGGGSGGGGSEVQLVESGGGLVQPGRSLRLSCAASGFTFDDYAMNWVRQAPGKGLEWVSGISWSSGSMDYADSVKGRFTISRDNAKNSLYLQMNSLRTEDTALYYCAKAREVGDYYGMDVWGQGTTVTVSSGGGGSGGGGSAHPGRPRAVPTQCDVPPNSRFDCAPDKAITQEQCEARGCCYIPAKQGLQGAQMGQPWCFFPPSYPSYKLENLSSSEMGYTATLTRTTPTFFPKDILTLRLDVMMETENRLHFTIKDPANRRYEVPLETPHVHSRAPSPLYSVEFSEEPFGVIVRRQLDGRVLLNTTVAPLFFADQFLQLSTSLPSQYITGLAEHLSPLMLSTSWTRITLWNRDLAPTPGANLYGSHPFYLALEDGGSAHGVFLLNSNAMDVVLQPSPALSWRSTGGILDVYIFLGPEPKSVVQQYLDVVGYPFMPPYWGLGFHLCRWGYSSTAITRQVVENMTRAHFPLDVQWNDLDYMDSRRDFTFNKDGFRDFPAMVQELHQGGRRYMMIVDPAISSSGPAGSYRPYDEGLRRGVFITNETGQPLIGKVWPGSTAFPDFTNPTALAWWEDMVAEFHDQVPFDGMWIDMNEPSNFIRGSEDGCPNNELENPPYVPGVVGGTLQAATICASSHQFLSTHYNLHNLYGLTEAIASHRALVKARGTRPFVISRSTFAGHGRYAGHWTGDVWSSWEQLASSVPEILQFNLLGVPLVGADVCGFLGNTSEELCVRWTQLGAFYPFMRNHNSLLSLPQEPYSFSEPAQQAMRKALTLRYALLPHLYTLFHQAHVAGETVARPLFLEFPKDSSTWTVDHQLLWGEALLITPVLQAGKAEVTGYFPLGTWYDLQTVPVEALGSLPPPPAAPREPAIHSEGQWVTLPAPLDTINVHLRAGYIIPLQGPGLTTTESRQQPMALAVALTKGGEARGELFWDDGESLEVLERGAYTQVIFLARNNTIVNELVRVTSEGAGLQLQKVTVLGVATAPQQVLSNGVPVSNFTYSPDTKVLDICVSLLMGEQFLVSWC

SEQ ID NO: 574 - DNA, 3417 bp, synthetic construct
  misc_feature 1..3417: note = Synthetic
  source 1..3417: mol_type = other DNA
gacatccagatgacccagtctccatcttccgtgtctgcatctgtaggagacagagtcaccatcacttgtcgggcgagtcagggtattgccagctggttagcctggtatcagcagaaaccagggaaagcccctgagctcctgatctatgctgcatccagtttgcaaggtggggtcccatcaaggttcagcggcagtggatctgggacagatttcactctcaccatcagcagcctgcagcctgaagattttgcaatttactattgtcaacaggctaactatttcccgtggacgttcggccaagggaccaaggtggaaatcaaaggcggcggcggaagcggagggggaggatcaggaggaggcggatcccagatcaccttgaaggagtctggtcctacgctggtgaaacccacacagaccctcacgctgacctgcaccttctctgggttctcactcagcactagtggagtgggtgtggtctggatccgtcagccccccggaaaggccctggagtggcttgcactcatttattggaatgatcataagcggtacagcccatctctggggagcaggctcaccatcaccaaggacacctccaaaaaccaggtggtccttacaatgaccaacatggaccctgtggacacagccacatattactgtgcacactacagtgggagctattcctactactactatggtttggacgtctggggccaagggaccacggtcaccgtctcctcaggaggtggtggaagtggaggtggtggaagtgcacaccccggccgtcccagagcagtgcccacacagtgcgacgtcccccccaacagccgcttcgattgcgcccctgacaaggccatcacccaggaacagtgcgaggcccgcggctgttgctacatccctgcaaagcaggggctgcagggagcccagatggggcagccctggtgcttcttcccacccagctaccccagctacaagctggagaacctgagctcctctgaaatgggctacacggccaccctgacccgtaccacccccaccttcttccccaaggacatcctgaccctgcggctggacgtgatgatggagactgagaaccgcctccacttcacgatcaaagatccagctaacaggcgctacgaggtgcccttggagaccccgcatgtccacagccgggcaccgtccccactctacagcgtggagttctccgaggagcccttcggggtgatcgtgcgccggcagctggacggccgcgtgctgctgaacacgacggtggcgcccctgttctttgcggaccagttccttcagctgtccacctcgctgccctcgcagtatatcacaggcctcgccgagcacctcagtcccctgatgctcagcaccagctggaccaggatcaccctgtggaaccgggaccttgcgcccacgcccggtgcgaacctctacgggtctcaccctttctacctggcgctggaggacggcgggtcggcacacggggtgttcctgctaaacagcaatgccatggatgtggtcctgcagccgagccctgcccttagctggaggtcgacaggtgggatcctggatgtctacatcttcctgggcccagagcccaagagcgtggtgcagcagtacctggacgttgtgggatacccgttcatgccgccatactggggcctgggcttccacctgtgccgctggggctactcctccaccgctatcacccgccaggtggtggagaacatgaccagggcccacttccccctggacgtccagtggaacgacctggactacatggactcccggagggacttcacgttcaacaaggatggcttccgggacttcccggccatggtgcaggagctgcaccagggcggccggcgctacatgatgatcgtggatcctgccatcagcagctcgggccctgccgggagctacaggccctacgacgagggtctgcggaggggggttttcatcaccaacgagaccggccagccgctgattgggaaggtatggcccgggtccactgccttccccgacttcaccaaccccacagccctggcctggtgggaggacatggtggctgagttccatgaccaggtgcccttcgacggcatgtggattgacatgaacgagccttccaacttcatcaggggctctgaggacggctgccccaacaatgagctggagaacccaccctacgtgcctggggtggttggggggaccctccaggcggccaccatctgtgcctccagccaccagtttctctccacacactacaacctgcacaacctctacggcctgaccgaagccatcgcctcccacagggcgctggtgaaggctcgggggacacgcccatttgtgatctcccgctcgacctttgctggccacggccgatacgccggccactggacgggggacgtgtggagctcctgggagcagctcgcctcctccgtgccagaaatcctgcagtttaacctgctgggggtgcctctggtcggggccgacgtctgcggcttcctgggcaacacctcagaggagctgtgtgtgcgctggacccagctgggggccttctaccccttcatgcggaaccacaacagcctgctcagtctgccccaggagccgtacagcttcagcgagccggcccagcaggccatgaggaaggccctcaccctgcgctacgcactcctcccccacctctacacactgttccaccaggcccacgtcgcgggggagaccgtggcccggcccctcttcctggagttccccaaggactctagcacctggactgtggaccaccagctcctgtggggggaggccctgctcatcaccccagtgctccaggccgggaaggccgaagtgactggctacttccccttgggcacatggtacgacctgcagacggtgccagtagaggcccttggcagcctcccacccccacctgcagctccccgtgagccagccatccacagcgaggggcagtgggtgacgctgccggcccccctggacaccatcaacgtccacctccgggctgggtacatcatccccctgcagggccctggcctcacaaccacagagtcccgccagcagcccatggccctggctgtggccctgaccaagggtggggaggcccgaggggagctgttctgggacgatggagagagcctggaagtgctggagcgaggggcctacacacaggtcatcttcctggccaggaataacacgatcgtgaatgagctggtacgtgtgaccagtgagggagctggcctgcagctgcagaaggtgactgtcctgggcgtggccacggcgccccagcaggtcctctccaacggtgtccctgtctccaacttcacctacagccccgacaccaaggtcctggacatctgtgtctcgctgttgatgggagagcagtttctcgtcagctggtgt

SEQ ID NO: 575 - DNA, 3426 bp, synthetic construct
  misc_feature 1..3426: note = Synthetic
  source 1..3426: mol_type = other DNA
gacatccagatgacccagtctccatcctccctgtctgcatctgtaggagacagagtcaccatcacttgccgggcaagtcagagcattagcagctatttaaattggtatcagcagaaaccagggaaagcccctaagctcctgatctatgctgcatccagtttgcaaagtggggtcccgtcaaggttcagtggcagtggatctgggacagatttcactctcaccatcagcagtctgcaacctgaagattttgcaacttactactgtcaacagagttacagtacccctccgatcaccttcggccaagggacacgactggagattaaaggcggcggcggaagcggagggggaggatcaggaggaggcggatcccaggtgcagctggtggagtctgggggaggcgtggtccagcctggaaggtccctgagactctcctgcgcagcctctggattcccctttagtaattatgtcatgtattgggtccgccaggctccaggcaaggggctggagtgggtggctcttattttttttgacggaaagaaaaactatcatgcagactccgtgaagggccgattcaccataaccagagacaattccaaaaatatgttatatctgcaaatgaacagcctgagacctgaggacgcggctgtgtattactgtgcgaaaatccattgtcctaatggtgtatgttacaaggggtattacggaatggacgtctggggccaagggaccacggtcaccgtctcctcaggaggtggtggaagtggaggtggtggaagtgcacaccccggccgtcccagagcagtgcccacacagtgcgacgtcccccccaacagccgcttcgattgcgcccctgacaaggccatcacccaggaacagtgcgaggcccgcggctgttgctacatccctgcaaagcaggggctgcagggagcccagatggggcagccctggtgcttcttcccacccagctaccccagctacaagctggagaacctgagctcctctgaaatgggctacacggccaccctgacccgtaccacccccaccttcttccccaaggacatcctgaccctgcggctggacgtgatgatggagactgagaaccgcctccacttcacgatcaaagatccagctaacaggcgctacgaggtgcccttggagaccccgcatgtccacagccgggcaccgtccccactctacagcgtggagttctccgaggagcccttcggggtgatcgtgcgccggcagctggacggccgcgtgctgctgaacacgacggtggcgcccctgttctttgcggaccagttccttcagctgtccacctcgctgccctcgcagtatatcacaggcctcgccgagcacctcagtcccctgatgctcagcaccagctggaccaggatcaccctgtggaaccgggaccttgcgcccacgcccggtgcgaacctctacgggtctcaccctttctacctggcgctggaggacggcgggtcggcacacggggtgttcctgctaaacagcaatgccatggatgtggtcctgcagccgagccctgcccttagctggaggtcgacaggtgggatcctggatgtctacatcttcctgggcccagagcccaagagcgtggtgcagcagtacctggacgttgtgggatacccgttcatgccgccatactggggcctgggcttccacctgtgccgctggggctactcctccaccgctatcacccgccaggtggtggagaacatgaccagggcccacttccccctggacgtccagtggaacgacctggactacatggactcccggagggacttcacgttcaacaaggatggcttccgggacttcccggccatggtgcaggagctgcaccagggcggccggcgctacatgatgatcgtggatcctgccatcagcagctcgggccctgccgggagctacaggccctacgacgagggtctgcggaggggggttttcatcaccaacgagaccggccagccgctgattgggaaggtatggcccgggtccactgccttccccgacttcaccaaccccacagccctggcctggtgggaggacatggtggctgagttccatgaccaggtgcccttcgacggcatgtggattgacatgaacgagccttccaacttcatcaggggctctgaggacggctgccccaacaatgagctggagaacccaccctacgtgcctggggtggttggggggaccctccaggcggccaccatctgtgcctccagccaccagtttctctccacacactacaacctgcacaacctctacggcctgaccgaagccatcgcctcccacagggcgctggtgaaggctcgggggacacgcccatttgtgatctcccgctcgacctttgctggccacggccgatacgccggccactggacgggggacgtgtggagctcctgggagcagctcgcctcctccgtgccagaaatcctgcagtttaacctgctgggggtgcctctggtcggggccgacgtctgcggcttcctgggcaacacctcagaggagctgtgtgtgcgctggacccagctgggggccttctaccccttcatgcggaaccacaacagcctgctcagtctgccccaggagccgtacagcttcagcgagccggcccagcaggccatgaggaaggccctcaccctgcgctacgcactcctcccccacctctacacactgttccaccaggcccacgtcgcgggggagaccgtggcccggcccctcttcctggagttccccaaggactctagcacctggactgtggaccaccagctcctgtggggggaggccctgctcatcaccccagtgctccaggccgggaaggccgaagtgactggctacttccccttgggcacatggtacgacctgcagacggtgccagtagaggcccttggcagcctcccacccccacctgcagctccccgtgagccagccatccacagcgaggggcagtgggtgacgctgccggcccccctggacaccatcaacgtccacctccgggctgggtacatcatccccctgcagggccctggcctcacaaccacagagtcccgccagcagcccatggccctggctgtggccctgaccaagggtggggaggcccgaggggagctgttctgggacgatggagagagcctggaagtgctggagcgaggggcctacacacaggtcatcttcctggccaggaataacacgatcgtgaatgagctggtacgtgtgaccagtgagggagctggcctgcagctgcagaaggtgactgtcctgggcgtggccacggcgccccagcaggtcctctccaacggtgtccctgtctccaacttcacctacagccccgacaccaaggtcctggacatctgtgtctcgctgttgatgggagagcagtttctcgtcagctggtgt

SEQ ID NO: 576 - DNA, 3405 bp, synthetic construct
  misc_feature 1..3405: note = Synthetic
  source 1..3405: mol_type = other DNA
gacatccagatgacccagtctccatcctccctgtctgcatctgtaggagacagagtcaccatcacttgccgggcaagtcagagcattagcagctatttaaattggtatcagcagaaaccagggaaagcccctaagctcctgatctatgctgcatccagtttgcaaagtggggtcccgtcaaggttcagtggcagtggatctgggacagatttcactctcaccatcagcagtctgcaacctgaagattttgcaacttactactgtcaacagagttacagtacccctccgatcaccttcggccaagggacacgactggagattaaaggcggcggcggaagcggagggggaggatcaggaggaggcggatccgaggtgcagctggtggagtctgggggaggcttagtacagcctggagggtccctaagactctcctgtgcagcctctggattcaccttcaatatttttgaaatgaactgggtccgccaggctccagggaaggggctggagtggatttcctacattagtagtcgtggaactaccacatactacgcagactctgtgaggggccgattcaccatctccagagacaacgccaagaactcactgtatctgcaaatgaacagcctgagagccgaggacacggctgtttattactgtgcgagagattatgaagcaacaatcccttttgacttctggggccagggaaccctggtcaccgtctcctcaggaggtggtggaagtggaggtggtggaagtgcacaccccggccgtcccagagcagtgcccacacagtgcgacgtcccccccaacagccgcttcgattgcgcccctgacaaggccatcacccaggaacagtgcgaggcccgcggctgttgctacatccctgcaaagcaggggctgcagggagcccagatggggcagccctggtgcttcttcccacccagctaccccagctacaagctggagaacctgagctcctctgaaatgggctacacggccaccctgacccgtaccacccccaccttcttccccaaggacatcctgaccctgcggctggacgtgatgatggagactgagaaccgcctccacttcacgatcaaagatccagctaacaggcgctacgaggtgcccttggagaccccgcatgtccacagccgggcaccgtccccactctacagcgtggagttctccgaggagcccttcggggtgatcgtgcgccggcagctggacggccgcgtgctgctgaacacgacggtggcgcccctgttctttgcggaccagttccttcagctgtccacctcgctgccctcgcagtatatcacaggcctcgccgagcacctcagtcccctgatgctcagcaccagctggaccaggatcaccctgtggaaccgggaccttgcgcccacgcccggtgcgaacctctacgggtctcaccctttctacctggcgctggaggacggcgggtcggcacacggggtgttcctgctaaacagcaatgccatggatgtggtcctgcagccgagccctgcccttagctggaggtcgacaggtgggatcctggatgtctacatcttcctgggcccagagcccaagagcgtggtgcagcagtacctggacgttgtgggatacccgttcatgccgccatactggggcctgggcttccacctgtgccgctggggctactcctccaccgctatcacccgccaggtggtggagaacatgaccagggcccacttccccctggacgtccagtggaacgacctggactacatggactcccggagggacttcacgttcaacaaggatggcttccgggacttcccggccatggtgcaggagctgcaccagggcggccggcgctacatgatgatcgtggatcctgccatcagcagctcgggccctgccgggagctacaggccctacgacgagggtctgcggaggggggttttcatcaccaacgagaccggccagccgctgattgggaaggtatggcccgggtccactgccttccccgacttcaccaaccccacagccctggcctggtgggaggacatggtggctgagttccatgaccaggtgcccttcgacggcatgtggattgacatgaacgagccttccaacttcatcaggggctctgaggacggctgccccaacaatgagctggagaacccaccctacgtgcctggggtggttggggggaccctccaggcggccaccatctgtgcctccagccaccagtttctctccacacactacaacctgcacaacctctacggcctgaccgaagccatcgcctcccacagggcgctggtgaaggctcgggggacacgcccatttgtgatctcccgctcgacctttgctggccacggccgatacgccggccactggacgggggacgtgtggagctcctgggagcagctcgcctcctccgtgccagaaatcctgcagtttaacctgctgggggtgcctctggtcggggccgacgtctgcggcttcctgggcaacacctcagaggagctgtgtgtgcgctggacccagctgggggccttctaccccttcatgcggaaccacaacagcctgctcagtctgccccaggagccgtacagcttcagcgagccggcccagcaggccatgaggaaggccctcaccctgcgctacgcactcctcccccacctctacacactgttccaccaggcccacgtcgcgggggagaccgtggcccggcccctcttcctggagttccccaaggactctagcacctggactgtggaccaccagctcctgtggggggaggccctgctcatcaccccagtgctccaggccgggaaggccgaagtgactggctacttccccttgggcacatggtacgacctgcagacggtgccagtagaggcccttggcagcctcccacccccacctgcagctccccgtgagccagccatccacagcgaggggcagtgggtgacgctgccggcccccctggacaccatcaacgtccacctccgggctgggtacatcatccccctgcagggccctggcctcacaaccacagagtcccgccagcagcccatggccctggctgtggccctgaccaagggtggggaggcccgaggggagctgttctgggacgatggagagagcctggaagtgctggagcgaggggcctacacacaggtcatcttcctggccaggaataacacgatcgtgaatgagctggtacgtgtgaccagtgagggagctggcctgcagctgcagaaggtgactgtcctgggcgtggccacggcgccccagcaggtcctctccaacggtgtccctgtctccaacttcacctacagccccgacaccaaggtcctggacatctgtgtctcgctgttgatgggagagcagtttctcgtcagctggtgt

SEQ ID NO: 577 - DNA, 3411 bp, synthetic construct
  misc_feature 1..3411: note = Synthetic
  source 1..3411: mol_type = other DNA
gacatccagatgacccagtctccatcctccctgtctgcatctgtaggagacagagtcaccatcacttgccgggcaagtcagagcattagcagctatttaaattggtatcagcagaaaccagggaaagcccctaagctcctgatctatgctgcatccagtttgcaaagtggggtcccgtcaaggttcagtggcagtggatctgggacagatttcactctcaccatcagcagtctgcaacctgaagattttgcaacttactactgtcaacagagttacagtacccctccgatcaccttcggccaagggacacgactggagattaaaggcggcggcggaagcggagggggaggatcaggaggaggcggatccgaagtgcagctggtggagtctgggggaggcttggttcagcctggcaggtccctgagactctcctgtgcagcctctggattcacctttgatgattatgccatgaactgggtccggcaagctccagggaagggcctggagtgggtctcaggtattagttggagtagtggtagcatggactatgcggactctgtgaagggccgattcaccatctccagagacaacgccaaaaactccctgtatctgcaaatgaacagtctgagaactgaggacacggccttatattactgtgcaaaagctagggaagttggagactactacggtatggacgtctggggccaagggaccacggtcaccgtctcctcaggaggtggtggaagtggaggtggtggaagtgcacaccccggccgtcccagagcagtgcccacacagtgcgacgtcccccccaacagccgcttcgattgcgcccctgacaaggccatcacccaggaacagtgcgaggcccgcggctgttgctacatccctgcaaagcaggggctgcagggagcccagatggggcagccctggtgcttcttcccacccagctaccccagctacaagctggagaacctgagctcctctgaaatgggctacacggccaccctgacccgtaccacccccaccttcttccccaaggacatcctgaccctgcggctggacgtgatgatggagactgagaaccgcctccacttcacgatcaaagatccagctaacaggcgctacgaggtgcccttggagaccccgcatgtccacagccgggcaccgtccccactctacagcgtggagttctccgaggagcccttcggggtgatcgtgcgccggcagctggacggccgcgtgctgctgaacacgacggtggcgcccctgttctttgcggaccagttccttcagctgtccacctcgctgccctcgcagtatatcacaggcctcgccgagcacctcagtcccctgatgctcagcaccagctggaccaggatcaccctgtggaaccgggaccttgcgcccacgcccggtgcgaacctctacgggtctcaccctttctacctggcgctggaggacggcgggtcggcacacggggtgttcctgctaaacagcaatgccatggatgtggtcctgcagccgagccctgcccttagctggaggtcgacaggtgggatcctggatgtctacatcttcctgggcccagagcccaagagcgtggtgcagcagtacctggacgttgtgggatacccgttcatgccgccatactggggcctgggcttccacctgtgccgctggggctactcctccaccgctatcacccgccaggtggtggagaacatgaccagggcccacttccccctggacgtccagtggaacgacctggactacatggactcccggagggacttcacgttcaacaaggatggcttccgggacttcccggccatggtgcaggagctgcaccagggcggccggcgctacatgatgatcgtggatcctgccatcagcagctcgggccctgccgggagctacaggccctacgacgagggtctgcggaggggggttttcatcaccaacgagaccggccagccgctgattgggaaggtatggcccgggtccactgccttccccgacttcaccaaccccacagccctggcctggtgggaggacatggtggctgagttccatgaccaggtgcccttcgacggcatgtggattgacatgaacgagccttccaacttcatcaggggctctgaggacggctgccccaacaatgagctggagaacccaccctacgtgcctggggtggttggggggaccctccaggcggccaccatctgtgcctccagccaccagtttctctccacacactacaacctgcacaacctctacggcctgaccgaagccatcgcctcccacagggcgctggtgaaggctcgggggacacgcccatttgtgatctcccgctcgacctttgctggccacggccgatacgccggccactggacgggggacgtgtggagctcctgggagcagctcgcctcctccgtgccagaaatcctgcagtttaacctgctgggggtgcctctggtcggggccgacgtctgcggcttcctgggcaacacctcagaggagctgtgtgtgcgctggacccagctgggggccttctaccccttcatgcggaaccacaacagcctgctcagtctgccccaggagccgtacagcttcagcgagccggcccagcaggccatgaggaaggccctcaccctgcgctacgcactcctcccccacctctacacactgttccaccaggcccacgtcgcgggggagaccgtggcccggcccctcttcctggagttccccaaggactctagcacctggactgtggaccaccagctcctgtggggggaggccctgctcatcaccccagtgctccaggccgggaaggccgaagtgactggctacttccccttgggcacatggtacgacctgcagacggtgccagtagaggcccttggcagcctcccacccccacctgcagctccccgtgagccagccatccacagcgaggggcagtgggtgacgctgccggcccccctggacaccatcaacgtccacctccgggctgggtacatcatccccctgcagggccctggcctcacaaccacagagtcccgccagcagcccatggccctggctgtggccctgaccaagggtggggaggcccgaggggagctgttctgggacgatggagagagcctggaagtgctggagcgaggggcctacacacaggtcatcttcctggccaggaataacacgatcgtgaatgagctggtacgtgtgaccagtgagggagctggcctgcagctgcagaaggtgactgtcctgggcgtggccacggcgccccagcaggtcctctccaacggtgtccctgtctccaacttcacctacagccccgacaccaaggtcctggacatctgtgtctcgctgttgatgggagagcagtttctcgtcagctggtgt

SEQ ID NO: 578 - DNA, 3417 bp, synthetic construct
  misc_feature 1..3417: note = Synthetic
  source 1..3417: mol_type = other DNA
gacatccagatgacacagagcccatcctctgtgtctgcctctgtgggagacagagtgaccatcacctgtagagccagccagggcattgcttcttggctggcctggtatcagcagaagcctggaaaggcccctgagctgctgatctatgctgccagctctctgcaaggtggtgtccccagcagattcagtggcagtggctctggcacagacttcaccctgaccataagcagcctgcagcctgaggactttgccatctactactgccagcaggccaactacttcccctggacatttggccagggcaccaaggtggaaatcaaaggtggtggtggaagtggtggtggtggcagtggtggtggtggaagccagatcaccctgaaagagtctggccccacactggtcaagcccacacagaccctgacactgacctgcaccttctctggcttcagcctgagcaccagtggtgttggagttgtgtggatcagacagcctcctggcaaggccctggaatggctggcactgatctactggaatgaccacaagagatacagccccagcctgggcagcagactgacaatcaccaaggacaccagcaagaaccaggtggtgctgaccatgaccaacatggaccctgtggacacagccacctactattgtgcccactactctggcagctacagctactactactatggcctggatgtgtggggacagggcacaacagtgacagtgtccagtggtggtggtggcagtggtggtggaggatctgcccatcctggcagacctagagctgtgcccacacagtgtgatgtgcctccaaacagcagatttgactgtgcccctgacaaggccatcacacaagagcagtgtgaagccagaggctgctgttacatccctgccaagcaaggactgcaaggggctcagatgggacagccctggtgcttcttcccaccatcttaccccagctacaagctggaaaacctgagcagctctgagatgggctacactgctacactgaccagaaccacacctacattcttcccaaaggacatcctgacactgaggctggatgtgatgatggaaacagagaacaggctgcacttcaccatcaaggaccctgccaatagaagatatgaggtgcccctggaaacccctcatgtgcactctagagccccatctccactgtactctgtggaattttctgaggaaccctttggggtcatagtcagaaggcagctggatggcagagtgctgctgaacacaactgtggcccctctgttctttgctgatcagttcctgcagctgagcaccagcctgcctagccagtatatcacaggcctggcagagcacctgtctccactgatgctgagcacatcctggaccagaatcaccctgtggaacagagacctggctcccacacctggggccaacctgtatggctctcaccccttctatctggccctggaagatggtggttcagcccatggtgtctttctgctgaactccaatgccatggatgtggtgctgcagccctctcctgctctgtcttggagaagcactggtggcatcctggatgtgtacatctttctgggccctgagcctaagtctgtggtgcagcagtacctggatgttgtgggctaccccttcatgcctccttattggggcctgggcttccacctgtgcagatggggatacagcagcacagccatcaccagacaggttgtggaaaacatgaccagagcacacttcccactggatgtgcagtggaatgacctggactacatggacagcagaagggacttcaccttcaacaaggatggcttcagagacttccctgccatggtgcaagagctgcaccaaggtggtagaagatatatgatgattgtggacccagccatcagctcctctggaccagctggcagctacagaccctatgatgagggactgagaagaggggtgttcatcaccaatgagacaggccagcctctgattggcaaagtgtggccaggctccacagcctttccagatttcacaaaccccacagctctggcttggtgggaagatatggtggcagagttccatgatcaggtgccctttgatggcatgtggattgacatgaatgagcccagcaacttcatcaggggctctgaggatggatgccccaacaatgaactggaaaatcctccttatgtgcctggtgttgttggagggacactgcaggcagccacaatttgtgccagctctcaccagtttctgagcacccactacaacctgcacaatctgtatggcctgactgaggccattgccagccacagggctcttgtgaaggctagaggcaccagaccttttgtgatcagcaggtccacctttgctggccatggcagatatgctggccactggactggggatgtgtggtctagttgggagcagctggctagctctgtgcctgagatcctgcagttcaacctgctgggagtgccccttgttggagcagatgtgtgtggcttcctgggcaacacctcagaggaactgtgtgtcagatggactcagctgggagcattctaccctttcatgagaaaccacaacagcctgctgagcctgcctcaagagccttacagcttttctgagccagcacagcaggccatgagaaaggccctgactctgagatatgccctgctgcctcacctgtacaccctgttccatcaggctcatgtggctggggagactgtggctagacccctgttcctggaattccccaaggacagctccacctggacagtggatcatcagctgctgtggggagaagccctgctgattacacctgtgctgcaggctggcaaggctgaagtgacaggctacttccctcttggcacttggtatgacctgcagacagtgcctgtggaagctctgggatctctgcctccacctcctgctgctcctagagagcctgccattcactctgaaggccagtgggttaccctgcctgctccactggataccatcaatgtgcatctgagagcaggctacatcatccctctgcaaggccctggcctgaccaccacagaatctagacagcagccaatggcactggctgtggccctgaccaaaggtggagaagctagaggggagctgttctgggatgatggggagagcctggaagtgctggaaagaggggcctatacacaagtgatttttctggctaggaacaataccattgtgaatgagcttgtcagagtcacctctgaaggtgctggcctgcagctccagaaagtgacagtgcttggagtggccacagcaccccagcaagtgctgtctaatggggtgccagtgtccaacttcacatacagccctgataccaaggtcctggacatctgtgtgtccctgcttatgggagagcagttcctggtgtcttggtgc

SEQ ID NO: 579 - DNA, 3417 bp, synthetic construct
  misc_feature 1..3417: note = Synthetic
  source 1..3417: mol_type = other DNA
gacatccagatgacccagagcccaagctctgtgtctgcctcagtgggagacagagtgacaatcacctgcagagccagccagggcattgccagctggctggcctggtaccagcagaagcctggcaaagctcctgaactcctgatctatgctgccagcagcctgcagggtggggtgcctagcaggttctctggctcaggctctggcacagacttcaccctgacaatcagcagcctgcagcctgaggactttgctatctactactgccagcaggccaactacttcccctggacctttggccaaggcaccaaggtggagatcaagggaggaggaggctctggtggaggtggctctgggggagggggcagccagatcaccctgaaggagagtggccctacactggttaagcccacccagacactgacactgacctgcaccttctctggcttcagcctgagcaccagtggagtgggagtggtgtggatcagacagccccctggcaaggccctggaatggctggccctgatctactggaatgatcacaagagatacagccctagcctgggctccagactgaccatcaccaaggacaccagcaaaaaccaggtggtgctgaccatgaccaacatggatccagtggacacagccacctactactgtgcccactactctggcagctacagctactactactatggcctggatgtctggggccaaggcaccacagtcacagtgtccagtgggggtggaggctctggaggaggaggcagtgcccatcctggcagacctagagctgtgcccacacagtgtgatgtgcctccaaacagcagatttgactgtgcccctgacaaggccatcacacaagagcagtgtgaagccagaggctgctgttacatccctgccaagcaaggactgcaaggggctcagatgggacagccctggtgcttcttcccaccatcttaccccagctacaagctggaaaacctgagcagctctgagatgggctacactgctacactgaccagaaccacacctacattcttcccaaaggacatcctgacactgaggctggatgtgatgatggaaacagagaacaggctgcacttcaccatcaaggaccctgccaatagaagatatgaggtgcccctggaaacccctcatgtgcactctagagccccatctccactgtactctgtggaattttctgaggaaccctttggggtcatagtcagaaggcagctggatggcagagtgctgctgaacacaactgtggcccctctgttctttgctgatcagttcctgcagctgagcaccagcctgcctagccagtatatcacaggcctggcagagcacctgtctccactgatgctgagcacatcctggaccagaatcaccctgtggaacagagacctggctcccacacctggggccaacctgtatggctctcaccccttctatctggccctggaagatggtggttcagcccatggtgtctttctgctgaactccaatgccatggatgtggtgctgcagccctctcctgctctgtcttggagaagcactggtggcatcctggatgtgtacatctttctgggccctgagcctaagtctgtggtgcagcagtacctggatgttgtgggctaccccttcatgcctccttattggggcctgggcttccacctgtgcagatggggatacagcagcacagccatcaccagacaggttgtggaaaacatgaccagagcacacttcccactggatgtgcagtggaatgacctggactacatggacagcagaagggacttcaccttcaacaaggatggcttcagagacttccctgccatggtgcaagagctgcaccaaggtggtagaagatatatgatgattgtggacccagccatcagctcctctggaccagctggcagctacagaccctatgatgagggactgagaagaggggtgttcatcaccaatgagacaggccagcctctgattggcaaagtgtggccaggctccacagcctttccagatttcacaaaccccacagctctggcttggtgggaagatatggtggcagagttccatgatcaggtgccctttgatggcatgtggattgacatgaatgagcccagcaacttcatcaggggctctgaggatggatgccccaacaatgaactggaaaatcctccttatgtgcctggtgttgttggagggacactgcaggcagccacaatttgtgccagctctcaccagtttctgagcacccactacaacctgcacaatctgtatggcctgactgaggccattgccagccacagggctcttgtgaaggctagaggcaccagaccttttgtgatcagcaggtccacctttgctggccatggcagatatgctggccactggactggggatgtgtggtctagttgggagcagctggctagctctgtgcctgagatcctgcagttcaacctgctgggagtgccccttgttggagcagatgtgtgtggcttcctgggcaacacctcagaggaactgtgtgtcagatggactcagctgggagcattctaccctttcatgagaaaccacaacagcctgctgagcctgcctcaagagccttacagcttttctgagccagcacagcaggccatgagaaaggccctgactctgagatatgccctgctgcctcacctgtacaccctgttccatcaggctcatgtggctggggagactgtggctagacccctgttcctggaattccccaaggacagctccacctggacagtggatcatcagctgctgtggggagaagccctgctgattacacctgtgctgcaggctggcaaggctgaagtgacaggctacttccctcttggcacttggtatgacctgcagacagtgcctgtggaagctctgggatctctgcctccacctcctgctgctcctagagagcctgccattcactctgaaggccagtgggttaccctgcctgctccactggataccatcaatgtgcatctgagagcaggctacatcatccctctgcaaggccctggcctgaccaccacagaatctagacagcagccaatggcactggctgtggccctgaccaaaggtggagaagctagaggggagctgttctgggatgatggggagagcctggaagtgctggaaagaggggcctatacacaagtgatttttctggctaggaacaataccattgtgaatgagcttgtcagagtcacctctgaaggtgctggcctgcagctccagaaagtgacagtgcttggagtggccacagcaccccagcaagtgctgtctaatggggtgccagtgtccaacttcacatacagccctgataccaaggtcctggacatctgtgtgtccctgcttatgggagagcagttcctggtgtcttggtgc

SEQ ID NO: 580 - DNA, 3417 bp, synthetic construct
  misc_feature 1..3417: note = Synthetic
  source 1..3417: mol_type = other DNA
gatatccagatgacacaaagcccttcctctgtgtctgcttcagtgggagacagagtcacaatcacatgcagagccagccagggcattgccagctggctggcctggtaccagcagaagcctggcaaagccccagaactgctgatctatgctgccagcagcctccagggtggggtgcccagcagattctctggctctggctctggcacagacttcaccctgaccatcagcagcctgcagccagaggactttgccatctactactgccagcaggccaactacttcccctggacctttggccagggcaccaaggtggaaatcaaggggggaggaggctctggaggaggaggcagtggtggaggaggcagccagatcaccctgaaggagtctggccctaccctggtgaagcctacccagaccctgaccctgacctgcaccttctctggcttcagcctgagcacaagtggtgtgggagtggtgtggatcagacaaccccctggcaaggctctggagtggctggccctgatctactggaatgaccacaagagatacagccctagcctgggcagcaggctgaccatcaccaaagataccagcaagaaccaggtggtgctgaccatgaccaacatggaccctgttgacacagccacatactactgtgcccactacagtggcagctacagctactactactatggcctggatgtctggggccagggcaccacagtgacagtgtcctcagggggtggaggctctgggggaggaggcagtgcccatcctggcagacctagagctgtgcccacacagtgtgatgtgcctccaaacagcagatttgactgtgcccctgacaaggccatcacacaagagcagtgtgaagccagaggctgctgttacatccctgccaagcaaggactgcaaggggctcagatgggacagccctggtgcttcttcccaccatcttaccccagctacaagctggaaaacctgagcagctctgagatgggctacactgctacactgaccagaaccacacctacattcttcccaaaggacatcctgacactgaggctggatgtgatgatggaaacagagaacaggctgcacttcaccatcaaggaccctgccaatagaagatatgaggtgcccctggaaacccctcatgtgcactctagagccccatctccactgtactctgtggaattttctgaggaaccctttggggtcatagtcagaaggcagctggatggcagagtgctgctgaacacaactgtggcccctctgttctttgctgatcagttcctgcagctgagcaccagcctgcctagccagtatatcacaggcctggcagagcacctgtctccactgatgctgagcacatcctggaccagaatcaccctgtggaacagagacctggctcccacacctggggccaacctgtatggctctcaccccttctatctggccctggaagatggtggttcagcccatggtgtctttctgctgaactccaatgccatggatgtggtgctgcagccctctcctgctctgtcttggagaagcactggtggcatcctggatgtgtacatctttctgggccctgagcctaagtctgtggtgcagcagtacctggatgttgtgggctaccccttcatgcctccttattggggcctgggcttccacctgtgcagatggggatacagcagcacagccatcaccagacaggttgtggaaaacatgaccagagcacacttcccactggatgtgcagtggaatgacctggactacatggacagcagaagggacttcaccttcaacaaggatggcttcagagacttccctgccatggtgcaagagctgcaccaaggtggtagaagatatatgatgattgtggacccagccatcagctcctctggaccagctggcagctacagaccctatgatgagggactgagaagaggggtgttcatcaccaatgagacaggccagcctctgattggcaaagtgtggccaggctccacagcctttccagatttcacaaaccccacagctctggcttggtgggaagatatggtggcagagttccatgatcaggtgccctttgatggcatgtggattgacatgaatgagcccagcaacttcatcaggggctctgaggatggatgccccaacaatgaactggaaaatcctccttatgtgcctggtgttgttggagggacactgcaggcagccacaatttgtgccagctctcaccagtttctgagcacccactacaacctgcacaatctgtatggcctgactgaggccattgccagccacagggctcttgtgaaggctagaggcaccagaccttttgtgatcagcaggtccacctttgctggccatggcagatatgctggccactggactggggatgtgtggtctagttgggagcagctggctagctctgtgcctgagatcctgcagttcaacctgctgggagtgccccttgttggagcagatgtgtgtggcttcctgggcaacacctcagaggaactgtgtgtcagatggactcagctgggagcattctaccctttcatgagaaaccacaacagcctgctgagcctgcctcaagagccttacagcttttctgagccagcacagcaggccatgagaaaggccctgactctgagatatgccctgctgcctcacctgtacaccctgttccatcaggctcatgtggctggggagactgtggctagacccctgttcctggaattccccaaggacagctccacctggacagtggatcatcagctgctgtggggagaagccctgctgattacacctgtgctgcaggctggcaaggctgaagtgacaggctacttccctcttggcacttggtatgacctgcagacagtgcctgtggaagctctgggatctctgcctccacctcctgctgctcctagagagcctgccattcactctgaaggccagtgggttaccctgcctgctccactggataccatcaatgtgcatctgagagcaggctacatcatccctctgcaaggccctggcctgaccaccacagaatctagacagcagccaatggcactggctgtggccctgaccaaaggtggagaagctagaggggagctgttctgggatgatggggagagcctggaagtgctggaaagaggggcctatacacaagtgatttttctggctaggaacaataccattgtgaatgagcttgtcagagtcacctctgaaggtgctggcctgcagctccagaaagtgacagtgcttggagtggccacagcaccccagcaagtgctgtctaatggggtgccagtgtccaacttcacatacagccctgataccaaggtcctggacatctgtgtgtccctgcttatgggagagcagttcctggtgtcttggtgc

SEQ ID NO: 581 - DNA, 3405 bp, synthetic construct
  misc_feature 1..3405: note = Synthetic
  source 1..3405: mol_type = other DNA
gacatccagatgacacagagcccctctagcctgtctgcctctgtgggagacagagtgaccatcacctgtagagccagccagagcatcagcagctacctgaactggtatcagcagaagcctggcaaggcccctaaactgctgatctatgctgccagcagcctgcagtctggggtgccctctagattttctggcagtggctctggcacagacttcaccctgaccataagctccctgcagcctgaggactttgccacctactactgtcagcagagctacagcacccctcctatcacctttggccagggcaccagactggaaatcaaaggtggtggtggaagtggtggtggtggcagtggtggtggtggatctgaagtgcagctggtggaaagtggtggtggcctggttcagcctggtggctctctgagactgagctgtgcagcctctggcttcaccttcaacatctttgagatgaactgggtcagacaggccccaggcaaaggcctggaatggatcagctacatcagctccagaggcaccacaacctactatgctgactctgtcagaggcaggttcaccatcagcagagacaatgccaagaacagcctgtacctgcagatgaactccctgagagctgaggacacagcagtgtactactgtgccagggactatgaggctacaatcccctttgacttctggggccagggaaccctggtcacagttagcagtggtggtggtggtagtggtggtggtggctctgcccatcctggcagacctagagctgtgcccacacagtgtgatgtgcctccaaacagcagatttgactgtgcccctgacaaggccatcacacaagagcagtgtgaagccagaggctgctgttacatccctgccaagcaaggactgcaaggggctcagatgggacagccctggtgcttcttcccaccatcttaccccagctacaagctggaaaacctgagcagctctgagatgggctacactgctacactgaccagaaccacacctacattcttcccaaaggacatcctgacactgaggctggatgtgatgatggaaacagagaacaggctgcacttcaccatcaaggaccctgccaatagaagatatgaggtgcccctggaaacccctcatgtgcactctagagccccatctccactgtactctgtggaattttctgaggaaccctttggggtcatagtcagaaggcagctggatggcagagtgctgctgaacacaactgtggcccctctgttctttgctgatcagttcctgcagctgagcaccagcctgcctagccagtatatcacaggcctggcagagcacctgtctccactgatgctgagcacatcctggaccagaatcaccctgtggaacagagacctggctcccacacctggggccaacctgtatggctctcaccccttctatctggccctggaagatggtggttcagcccatggtgtctttctgctgaactccaatgccatggatgtggtgctgcagccctctcctgctctgtcttggagaagcactggtggcatcctggatgtgtacatctttctgggccctgagcctaagtctgtggtgcagcagtacctggatgttgtgggctaccccttcatgcctccttattggggcctgggcttccacctgtgcagatggggatacagcagcacagccatcaccagacaggttgtggaaaacatgaccagagcacacttcccactggatgtgcagtggaatgacctggactacatggacagcagaagggacttcaccttcaacaaggatggcttcagagacttccctgccatggtgcaagagctgcaccaaggtggtagaagatatatgatgattgtggacccagccatcagctcctctggaccagctggcagctacagaccctatgatgagggactgagaagaggggtgttcatcaccaatgagacaggccagcctctgattggcaaagtgtggccaggctccacagcctttccagatttcacaaaccccacagctctggcttggtgggaagatatggtggcagagttccatgatcaggtgccctttgatggcatgtggattgacatgaatgagcccagcaacttcatcaggggctctgaggatggatgccccaacaatgaactggaaaatcctccttatgtgcctggtgttgttggagggacactgcaggcagccacaatttgtgccagctctcaccagtttctgagcacccactacaacctgcacaatctgtatggcctgactgaggccattgccagccacagggctcttgtgaaggctagaggcaccagaccttttgtgatcagcaggtccacctttgctggccatggcagatatgctggccactggactggggatgtgtggtctagttgggagcagctggctagctctgtgcctgagatcctgcagttcaacctgctgggagtgccccttgttggagcagatgtgtgtggcttcctgggcaacacctcagaggaactgtgtgtcagatggactcagctgggagcattctaccctttcatgagaaaccacaacagcctgctgagcctgcctcaagagccttacagcttttctgagccagcacagcaggccatgagaaaggccctgactctgagatatgccctgctgcctcacctgtacaccctgttccatcaggctcatgtggctggggagactgtggctagacccctgttcctggaattccccaaggacagctccacctggacagtggatcatcagctgctgtggggagaagccctgctgattacacctgtgctgcaggctggcaaggctgaagtgacaggctacttccctcttggcacttggtatgacctgcagacagtgcctgtggaagctctgggatctctgcctccacctcctgctgctcctagagagcctgccattcactctgaaggccagtgggttaccctgcctgctccactggataccatcaatgtgcatctgagagcaggctacatcatccctctgcaaggccctggcctgaccaccacagaatctagacagcagccaatggcactggctgtggccctgaccaaaggtggagaagctagaggggagctgttctgggatgatggggagagcctggaagtgctggaaagaggggcctatacacaagtgatttttctggctaggaacaataccattgtgaatgagcttgtcagagtcacctctgaaggtgctggcctgcagctccagaaagtgacagtgcttggagtggccacagcaccccagcaagtgctgtctaatggggtgccagtgtccaacttcacatacagccctgataccaaggtcctggacatctgtgtgtccctgcttatgggagagcagttcctggtgtcttggtgc

SEQ ID NO: 582 - DNA, 3405 bp, synthetic construct
  misc_feature 1..3405: note = Synthetic
  source 1..3405: mol_type = other DNA
gacatccagatgacccagagccccagcagcctgtctgcctctgtgggtgacagggtgaccattacctgcagagccagccaaagcatcagcagctacctgaactggtaccagcagaagccaggcaaggcccctaagctgctgatctatgctgccagcagcctgcaatctggagtgcctagcagattcagtggctctggctcaggcacagacttcaccctgaccatctccagcctccagcctgaggattttgccacctactactgccagcagagctacagcaccccccctatcacctttggccagggcaccagactggaaatcaagggaggaggaggctctggaggaggaggctctggagggggaggctctgaggtgcagctggtggagtctgggggaggcctggtgcagcctggaggctccctgaggctgagctgtgctgcctcaggcttcaccttcaacatctttgaaatgaactgggtcagacaggcccctggcaaaggcctggaatggatcagctacatcagcagcagaggcacaacaacatactatgctgactctgtgagaggcaggttcacaatcagcagagacaatgccaagaacagcctgtacctgcagatgaacagcctgagagcagaggatacagctgtgtactactgtgccagagactatgaggccaccatcccctttgatttctggggccagggcaccctggttacagtgtccagtggtgggggtggctctgggggtggaggcagtgcccatcctggcagacctagagctgtgcccacacagtgtgatgtgcctccaaacagcagatttgactgtgcccctgacaaggccatcacacaagagcagtgtgaagccagaggctgctgttacatccctgccaagcaaggactgcaaggggctcagatgggacagccctggtgcttcttcccaccatcttaccccagctacaagctggaaaacctgagcagctctgagatgggctacactgctacactgaccagaaccacacctacattcttcccaaaggacatcctgacactgaggctggatgtgatgatggaaacagagaacaggctgcacttcaccatcaaggaccctgccaatagaagatatgaggtgcccctggaaacccctcatgtgcactctagagccccatctccactgtactctgtggaattttctgaggaaccctttggggtcatagtcagaaggcagctggatggcagagtgctgctgaacacaactgtggcccctctgttctttgctgatcagttcctgcagctgagcaccagcctgcctagccagtatatcacaggcctggcagagcacctgtctccactgatgctgagcacatcctggaccagaatcaccctgtggaacagagacctggctcccacacctggggccaacctgtatggctctcaccccttctatctggccctggaagatggtggttcagcccatggtgtctttctgctgaactccaatgccatggatgtggtgctgcagccctctcctgctctgtcttggagaagcactggtggcatcctggatgtgtacatctttctgggccctgagcctaagtctgtggtgcagcagtacctggatgttgtgggctaccccttcatgcctccttattggggcctgggcttccacctgtgcagatggggatacagcagcacagccatcaccagacaggttgtggaaaacatgaccagagcacacttcccactggatgtgcagtggaatgacctggactacatggacagcagaagggacttcaccttcaacaaggatggcttcagagacttccctgccatggtgcaagagctgcaccaaggtggtagaagatatatgatgattgtggacccagccatcagctcctctggaccagctggcagctacagaccctatgatgagggactgagaagaggggtgttcatcaccaatgagacaggccagcctctgattggcaaagtgtggccaggctccacagcctttccagatttcacaaaccccacagctctggcttggtgggaagatatggtggcagagttccatgatcaggtgccctttgatggcatgtggattgacatgaatgagcccagcaacttcatcaggggctctgaggatggatgccccaacaatgaactggaaaatcctccttatgtgcctggtgttgttggagggacactgcaggcagccacaatttgtgccagctctcaccagtttctgagcacccactacaacctgcacaatctgtatggcctgactgaggccattgccagccacagggctcttgtgaaggctagaggcaccagaccttttgtgatcagcaggtccacctttgctggccatggcagatatgctggccactggactggggatgtgtggtctagttgggagcagctggctagctctgtgcctgagatcctgcagttcaacctgctgggagtgccccttgttggagcagatgtgtgtggcttcctgggcaacacctcagaggaactgtgtgtcagatggactcagctgggagcattctaccctttcatgagaaaccacaacagcctgctgagcctgcctcaagagccttacagcttttctgagccagcacagcaggccatgagaaaggccctgactctgagatatgccctgctgcctcacctgtacaccctgttccatcaggctcatgtggctggggagactgtggctagacccctgttcctggaattccccaaggacagctccacctggacagtggatcatcagctgctgtggggagaagccctgctgattacacctgtgctgcaggctggcaaggctgaagtgacaggctacttccctcttggcacttggtatgacctgcagacagtgcctgtggaagctctgggatctctgcctccacctcctgctgctcctagagagcctgccattcactctgaaggccagtgggttaccctgcctgctccactggataccatcaatgtgcatctgagagcaggctacatcatccctctgcaaggccctggcctgaccaccacagaatctagacagcagccaatggcactggctgtggccctgaccaaaggtggagaagctagaggggagctgttctgggatgatggggagagcctggaagtgctggaaagaggggcctatacacaagtgatttttctggctaggaacaataccattgtgaatgagcttgtcagagtcacctctgaaggtgctggcctgcagctccagaaagtgacagtgcttggagtggccacagcaccccagcaagtgctgtctaatggggtgccagtgtccaacttcacatacagccctgataccaaggtcctggacatctgtgtgtccctgcttatgggagagcagttcctggtgtcttggtgc

SEQ ID NO: 583 - DNA, 3405 bp, synthetic construct
  misc_feature 1..3405: note = Synthetic
  source 1..3405: mol_type = other DNA
gatatccaaatgacccagagccccagctccctgtcagcctctgtgggagacagagtgaccatcacatgcagagccagccagagcatcagcagctacctgaactggtaccagcagaagcctggcaaggcccccaagctgctgatctatgctgccagcagcctgcagtctggagtgccttccagattctctggctcaggcagtggcacagacttcaccctgacaatcagcagcctgcagcctgaagactttgccacctactactgccagcagagctacagcacaccacctatcacctttggccagggcaccagactggagatcaaagggggtgggggctctggggggggaggcagtggaggaggtggctctgaagtccagctggtggagtctggaggaggcctggtgcagcctggaggcagcctgaggctgtcctgtgcagcctctggcttcaccttcaacatctttgagatgaactgggttaggcaggcccctggcaagggcctggaatggatcagctacattagcagcagaggcaccacaacctactatgctgactctgtgaggggcagattcaccatcagcagagataatgccaagaacagcctgtacctgcagatgaacagcctcagagctgaggacacagctgtgtactactgtgccagagattatgaggccaccatcccctttgacttctggggccaaggcaccctggtgacagtgtcttctggaggtggaggctctggaggaggtggcagtgcccatcctggcagacctagagctgtgcccacacagtgtgatgtgcctccaaacagcagatttgactgtgcccctgacaaggccatcacacaagagcagtgtgaagccagaggctgctgttacatccctgccaagcaaggactgcaaggggctcagatgggacagccctggtgcttcttcccaccatcttaccccagctacaagctggaaaacctgagcagctctgagatgggctacactgctacactgaccagaaccacacctacattcttcccaaaggacatcctgacactgaggctggatgtgatgatggaaacagagaacaggctgcacttcaccatcaaggaccctgccaatagaagatatgaggtgcccctggaaacccctcatgtgcactctagagccccatctccactgtactctgtggaattttctgaggaaccctttggggtcatagtcagaaggcagctggatggcagagtgctgctgaacacaactgtggcccctctgttctttgctgatcagttcctgcagctgagcaccagcctgcctagccagtatatcacaggcctggcagagcacctgtctccactgatgctgagcacatcctggaccagaatcaccctgtggaacagagacctggctcccacacctggggccaacctgtatggctctcaccccttctatctggccctggaagatggtggttcagcccatggtgtctttctgctgaactccaatgccatggatgtggtgctgcagccctctcctgctctgtcttggagaagcactggtggcatcctggatgtgtacatctttctgggccctgagcctaagtctgtggtgcagcagtacctggatgttgtgggctaccccttcatgcctccttattggggcctgggcttccacctgtgcagatggggatacagcagcacagccatcaccagacaggttgtggaaaacatgaccagagcacacttcccactggatgtgcagtggaatgacctggactacatggacagcagaagggacttcaccttcaacaaggatggcttcagagacttccctgccatggtgcaagagctgcaccaaggtggtagaagatatatgatgattgtggacccagccatcagctcctctggaccagctggcagctacagaccctatgatgagggactgagaagaggggtgttcatcaccaatgagacaggccagcctctgattggcaaagtgtggccaggctccacagcctttccagatttcacaaaccccacagctctggcttggtgggaagatatggtggcagagttccatgatcaggtgccctttgatggcatgtggattgacatgaatgagcccagcaacttcatcaggggctctgaggatggatgccccaacaatgaactggaaaatcctccttatgtgcctggtgttgttggagggacactgcaggcagccacaatttgtgccagctctcaccagtttctgagcacccactacaacctgcacaatctgtatggcctgactgaggccattgccagccacagggctcttgtgaaggctagaggcaccagaccttttgtgatcagcaggtccacctttgctggccatggcagatatgctggccactggactggggatgtgtggtctagttgggagcagctggctagctctgtgcctgagatcctgcagttcaacctgctgggagtgccccttgttggagcagatgtgtgtggcttcctgggcaacacctcagaggaactgtgtgtcagatggactcagctgggagcattctaccctttcatgagaaaccacaacagcctgctgagcctgcctcaagagccttacagcttttctgagccagcacagcaggccatgagaaaggccctgactctgagatatgccctgctgcctcacctgtacaccctgttccatcaggctcatgtggctggggagactgtggctagacccctgttcctggaattccccaaggacagctccacctggacagtggatcatcagctgctgtggggagaagccctgctgattacacctgtgctgcaggctggcaaggctgaagtgacaggctacttccctcttggcacttggtatgacctgcagacagtgcctgtggaagctctgggatctctgcctccacctcctgctgctcctagagagcctgccattcactctgaaggccagtgggttaccctgcctgctccactggataccatcaatgtgcatctgagagcaggctacatcatccctctgcaaggccctggcctgaccaccacagaatctagacagcagccaatggcactggctgtggccctgaccaaaggtggagaagctagaggggagctgttctgggatgatggggagagcctggaagtgctggaaagaggggcctatacacaagtgatttttctggctaggaacaataccattgtgaatgagcttgtcagagtcacctctgaaggtgctggcctgcagctccagaaagtgacagtgcttggagtggccacagcaccccagcaagtgctgtctaatggggtgccagtgtccaacttcacatacagccctgataccaaggtcctggacatctgtgtgtccctgcttatgggagagcagttcctggtgtcttggtgc

SEQ ID NO: 584 - DNA, 3411 bp, synthetic construct
  misc_feature 1..3411: note = Synthetic
  source 1..3411: mol_type = other DNA
gacatccagatgacacagagcccctctagcctgtctgcctctgtgggagacagagtgaccatcacctgtagagccagccagagcatcagcagctacctgaactggtatcagcagaagcctggcaaggcccctaaactgctgatctatgctgccagcagcctgcagtctggggtgccctctagattttctggcagtggctctggcacagacttcaccctgaccataagctccctgcagcctgaggactttgccacctactactgtcagcagagctacagcacccctcctatcacctttggccagggcaccagactggaaatcaaaggtggtggtggaagtggtggtggtggcagtggtggtggtggatctgaagtgcagctggtggaaagtggtggtggcctggttcagcctggcagatccctgagactgagctgtgcagcctctggctttacctttgatgactatgccatgaactgggtcagacaggccccaggcaaaggcctggaatgggtgtcaggcatctcttggtcctctggctccatggactatgctgactctgtgaagggcagattcaccatcagcagagacaatgccaagaacagcctgtacctgcagatgaactccctgagaacagaggacacagccctgtactactgtgccaaggccagagaagtgggagactactatggcatggatgtgtggggccagggaaccacagtgacagtcagtagtggtggtggtggcagtggtggtggtggttctgcccatcctggcagacctagagctgtgcccacacagtgtgatgtgcctccaaacagcagatttgactgtgcccctgacaaggccatcacacaagagcagtgtgaagccagaggctgctgttacatccctgccaagcaaggactgcaaggggctcagatgggacagccctggtgcttcttcccaccatcttaccccagctacaagctggaaaacctgagcagctctgagatgggctacactgctacactgaccagaaccacacctacattcttcccaaaggacatcctgacactgaggctggatgtgatgatggaaacagagaacaggctgcacttcaccatcaaggaccctgccaatagaagatatgaggtgcccctggaaacccctcatgtgcactctagagccccatctccactgtactctgtggaattttctgaggaaccctttggggtcatagtcagaaggcagctggatggcagagtgctgctgaacacaactgtggcccctctgttctttgctgatcagttcctgcagctgagcaccagcctgcctagccagtatatcacaggcctggcagagcacctgtctccactgatgctgagcacatcctggaccagaatcaccctgtggaacagagacctggctcccacacctggggccaacctgtatggctctcaccccttctatctggccctggaagatggtggttcagcccatggtgtctttctgctgaactccaatgccatggatgtggtgctgcagccctctcctgctctgtcttggagaagcactggtggcatcctggatgtgtacatctttctgggccctgagcctaagtctgtggtgcagcagtacctggatgttgtgggctaccccttcatgcctccttattggggcctgggcttccacctgtgcagatggggatacagcagcacagccatcaccagacaggttgtggaaaacatgaccagagcacacttcccactggatgtgcagtggaatgacctggactacatggacagcagaagggacttcaccttcaacaaggatggcttcagagacttccctgccatggtgcaagagctgcaccaaggtggtagaagatatatgatgattgtggacccagccatcagctcctctggaccagctggcagctacagaccctatgatgagggactgagaagaggggtgttcatcaccaatgagacaggccagcctctgattggcaaagtgtggccaggctccacagcctttccagatttcacaaaccccacagctctggcttggtgggaagatatggtggcagagttccatgatcaggtgccctttgatggcatgtggattgacatgaatgagcccagcaacttcatcaggggctctgaggatggatgccccaacaatgaactggaaaatcctccttatgtgcctggtgttgttggagggacactgcaggcagccacaatttgtgccagctctcaccagtttctgagcacccactacaacctgcacaatctgtatggcctgactgaggccattgccagccacagggctcttgtgaaggctagaggcaccagaccttttgtgatcagcaggtccacctttgctggccatggcagatatgctggccactggactggggatgtgtggtctagttgggagcagctggctagctctgtgcctgagatcctgcagttcaacctgctgggagtgccccttgttggagcagatgtgtgtggcttcctgggcaacacctcagaggaactgtgtgtcagatggactcagctgggagcattctaccctttcatgagaaaccacaacagcctgctgagcctgcctcaagagccttacagcttttctgagccagcacagcaggccatgagaaaggccctgactctgagatatgccctgctgcctcacctgtacaccctgttccatcaggctcatgtggctggggagactgtggctagacccctgttcctggaattccccaaggacagctccacctggacagtggatcatcagctgctgtggggagaagccctgctgattacacctgtgctgcaggctggcaaggctgaagtgacaggctacttccctcttggcacttggtatgacctgcagacagtgcctgtggaagctctgggatctctgcctccacctcctgctgctcctagagagcctgccattcactctgaaggccagtgggttaccctgcctgctccactggataccatcaatgtgcatctgagagcaggctacatcatccctctgcaaggccctggcctgaccaccacagaatctagacagcagccaatggcactggctgtggccctgaccaaaggtggagaagctagaggggagctgttctgggatgatggggagagcctggaagtgctggaaagaggggcctatacacaagtgatttttctggctaggaacaataccattgtgaatgagcttgtcagagtcacctctgaaggtgctggcctgcagctccagaaagtgacagtgcttggagtggccacagcaccccagcaagtgctgtctaatggggtgccagtgtccaacttcacatacagccctgataccaaggtcctggacatctgtgtgtccctgcttatgggagagcagttcctggtgtcttggtgc

SEQ ID NO: 585 - DNA, 3411 bp, synthetic construct
  misc_feature 1..3411: note = Synthetic
  source 1..3411: mol_type = other DNA
gatatccagatgacccagagccccagcagcctgtctgccagtgtgggggatagagtgaccatcacctgcagggccagccagagcatcagcagctacctcaactggtaccagcaaaagcctggcaaggcccccaaactgctgatttatgctgccagcagcctgcagtctggggtcccttccagattctctggctctggctctggcacagacttcaccctgaccatcagcagcctgcagccagaggactttgccacatactactgccagcagagctacagcaccccccctatcacctttggccagggcaccaggctggagatcaagggaggtgggggctcaggaggaggtggctctggaggaggaggctcagaggtgcagctggttgagagtggaggaggcctggtgcagcctggcagaagcctgagactgagctgtgctgcctctggcttcacctttgatgactatgccatgaactgggtgagacaggcccctggcaagggcctggaatgggtgtctggcatctcctggagctctggcagcatggactatgctgactctgtgaagggcaggttcaccatcagcagagacaatgccaagaacagcctgtacctgcagatgaacagcctgagaacagaagacacagccctgtactactgtgcaaaagccagagaagtgggagactactatggcatggatgtgtggggccaaggcaccacagtgacagtgagcagtggtggaggtggctcagggggaggaggcagtgcccatcctggcagacctagagctgtgcccacacagtgtgatgtgcctccaaacagcagatttgactgtgcccctgacaaggccatcacacaagagcagtgtgaagccagaggctgctgttacatccctgccaagcaaggactgcaaggggctcagatgggacagccctggtgcttcttcccaccatcttaccccagctacaagctggaaaacctgagcagctctgagatgggctacactgctacactgaccagaaccacacctacattcttcccaaaggacatcctgacactgaggctggatgtgatgatggaaacagagaacaggctgcacttcaccatcaaggaccctgccaatagaagatatgaggtgcccctggaaacccctcatgtgcactctagagccccatctccactgtactctgtggaattttctgaggaaccctttggggtcatagtcagaaggcagctggatggcagagtgctgctgaacacaactgtggcccctctgttctttgctgatcagttcctgcagctgagcaccagcctgcctagccagtatatcacaggcctggcagagcacctgtctccactgatgctgagcacatcctggaccagaatcaccctgtggaacagagacctggctcccacacctggggccaacctgtatggctctcaccccttctatctggccctggaagatggtggttcagcccatggtgtctttctgctgaactccaatgccatggatgtggtgctgcagccctctcctgctctgtcttggagaagcactggtggcatcctggatgtgtacatctttctgggccctgagcctaagtctgtggtgcagcagtacctggatgttgtgggctaccccttcatgcctccttattggggcctgggcttccacctgtgcagatggggatacagcagcacagccatcaccagacaggttgtggaaaacatgaccagagcacacttcccactggatgtgcagtggaatgacctggactacatggacagcagaagggacttcaccttcaacaaggatggcttcagagacttccctgccatggtgcaagagctgcaccaaggtggtagaagatatatgatgattgtggacccagccatcagctcctctggaccagctggcagctacagaccctatgatgagggactgagaagaggggtgttcatcaccaatgagacaggccagcctctgattggcaaagtgtggccaggctccacagcctttccagatttcacaaaccccacagctctggcttggtgggaagatatggtggcagagttccatgatcaggtgccctttgatggcatgtggattgacatgaatgagcccagcaacttcatcaggggctctgaggatggatgccccaacaatgaactggaaaatcctccttatgtgcctggtgttgttggagggacactgcaggcagccacaatttgtgccagctctcaccagtttctgagcacccactacaacctgcacaatctgtatggcctgactgaggccattgccagccacagggctcttgtgaaggctagaggcaccagaccttttgtgatcagcaggtccacctttgctggccatggcagatatgctggccactggactggggatgtgtggtctagttgggagcagctggctagctctgtgcctgagatcctgcagttcaacctgctgggagtgccccttgttggagcagatgtgtgtggcttcctgggcaacacctcagaggaactgtgtgtcagatggactcagctgggagcattctaccctttcatgagaaaccacaacagcctgctgagcctgcctcaagagccttacagcttttctgagccagcacagcaggccatgagaaaggccctgactctgagatatgccctgctgcctcacctgtacaccctgttccatcaggctcatgtggctggggagactgtggctagacccctgttcctggaattccccaaggacagctccacctggacagtggatcatcagctgctgtggggagaagccctgctgattacacctgtgctgcaggctggcaaggctgaagtgacaggctacttccctcttggcacttggtatgacctgcagacagtgcctgtggaagctctgggatctctgcctccacctcctgctgctcctagagagcctgccattcactctgaaggccagtgggttaccctgcctgctccactggataccatcaatgtgcatctgagagcaggctacatcatccctctgcaaggccctggcctgaccaccacagaatctagacagcagccaatggcactggctgtggccctgaccaaaggtggagaagctagaggggagctgttctgggatgatggggagagcctggaagtgctggaaagaggggcctatacacaagtgatttttctggctaggaacaataccattgtgaatgagcttgtcagagtcacctctgaaggtgctggcctgcagctccagaaagtgacagtgcttggagtggccacagcaccccagcaagtgctgtctaatggggtgccagtgtccaacttcacatacagccctgataccaaggtcctggacatctgtgtgtccctgcttatgggagagcagttcctggtgtcttggtgc

SEQ ID NO: 586 - DNA, 3411 bp, synthetic construct
  misc_feature 1..3411: note = Synthetic
  source 1..3411: mol_type = other DNA
gacatccagatgacccagagccccagctccctgtcagccagtgtgggtgacagagtgaccatcacctgcagagccagccagagcatcagcagctacctgaactggtaccagcagaaacctggcaaagcccccaagctgctgatttatgctgctagcagcctgcagagtggagtgcccagcagattctcaggcagtggctctggcacagacttcaccctgaccatctccagcctgcagccagaagactttgccacctactactgccagcagagctacagcacccctcctatcacctttggccagggcacaagactggagatcaagggaggaggaggctctggaggaggaggctctggagggggaggctctgaggtccaactggttgaatctggagggggcctggtgcaacctggcaggagcctgagactgagctgtgctgcctctggcttcacctttgatgactatgccatgaactgggtgagacaggcccctggcaagggcctggagtgggtgtctggcatcagctggagctctggcagcatggactatgcagattctgtgaagggcaggttcaccatcagcagagataatgccaagaacagcctgtacctgcagatgaacagcctcaggacagaggacacagccctgtactactgtgccaaggccagagaagtgggtgactactatggcatggatgtgtggggccagggcaccacagtgacagtgagctctgggggaggaggctcaggtgggggtggcagtgcccatcctggcagacctagagctgtgcccacacagtgtgatgtgcctccaaacagcagatttgactgtgcccctgacaaggccatcacacaagagcagtgtgaagccagaggctgctgttacatccctgccaagcaaggactgcaaggggctcagatgggacagccctggtgcttcttcccaccatcttaccccagctacaagctggaaaacctgagcagctctgagatgggctacactgctacactgaccagaaccacacctacattcttcccaaaggacatcctgacactgaggctggatgtgatgatggaaacagagaacaggctgcacttcaccatcaaggaccctgccaatagaagatatgaggtgcccctggaaacccctcatgtgcactctagagccccatctccactgtactctgtggaattttctgaggaaccctttggggtcatagtcagaaggcagctggatggcagagtgctgctgaacacaactgtggcccctctgttctttgctgatcagttcctgcagctgagcaccagcctgcctagccagtatatcacaggcctggcagagcacctgtctccactgatgctgagcacatcctggaccagaatcaccctgtggaacagagacctggctcccacacctggggccaacctgtatggctctcaccccttctatctggccctggaagatggtggttcagcccatggtgtctttctgctgaactccaatgccatggatgtggtgctgcagccctctcctgctctgtcttggagaagcactggtggcatcctggatgtgtacatctttctgggccctgagcctaagtctgtggtgcagcagtacctggatgttgtgggctaccccttcatgcctccttattggggcctgggcttccacctgtgcagatggggatacagcagcacagccatcaccagacaggttgtggaaaacatgaccagagcacacttcccactggatgtgcagtggaatgacctggactacatggacagcagaagggacttcaccttcaacaaggatggcttcagagacttccctgccatggtgcaagagctgcaccaaggtggtagaagatatatgatgattgtggacccagccatcagctcctctggaccagctggcagctacagaccctatgatgagggactgagaagaggggtgttcatcaccaatgagacaggccagcctctgattggcaaagtgtggccaggctccacagcctttccagatttcacaaaccccacagctctggcttggtgggaagatatggtggcagagttccatgatcaggtgccctttgatggcatgtggattgacatgaatgagcccagcaacttcatcaggggctctgaggatggatgccccaacaatgaactggaaaatcctccttatgtgcctggtgttgttggagggacactgcaggcagccacaatttgtgccagctctcaccagtttctgagcacccactacaacctgcacaatctgtatggcctgactgaggccattgccagccacagggctcttgtgaaggctagaggcaccagaccttttgtgatcagcaggtccacctttgctggccatggcagatatgctggccactggactggggatgtgtggtctagttgggagcagctggctagctctgtgcctgagatcctgcagttcaacctgctgggagtgccccttgttggagcagatgtgtgtggcttcctgggcaacacctcagaggaactgtgtgtcagatggactcagctgggagcattctaccctttcatgagaaaccacaacagcctgctgagcctgcctcaagagccttacagcttttctgagccagcacagcaggccatgagaaaggccctgactctgagatatgccctgctgcctcacctgtacaccctgttccatcaggctcatgtggctggggagactgtggctagacccctgttcctggaattccccaaggacagctccacctggacagtggatcatcagctgctgtggggagaagccctgctgattacacctgtgctgcaggctggcaaggctgaagtgacaggctacttccctcttggcacttggtatgacctgcagacagtgcctgtggaagctctgggatctctgcctccacctcctgctgctcctagagagcctgccattcactctgaaggccagtgggttaccctgcctgctccactggataccatcaatgtgcatctgagagcaggctacatcatccctctgcaaggccctggcctgaccaccacagaatctagacagcagccaatggcactggctgtggccctgaccaaaggtggagaagctagaggggagctgttctgggatgatggggagagcctggaagtgctggaaagaggggcctatacacaagtgatttttctggctaggaacaataccattgtgaatgagcttgtcagagtcacctctgaaggtgctggcctgcagctccagaaagtgacagtgcttggagtggccacagcaccccagcaagtgctgtctaatggggtgccagtgtccaacttcacatacagccctgataccaaggtcctggacatctgtgtgtccctgcttatgggagagcagttcctggtgtcttggtgc

SEQ ID NO: 587 - DNA, 738 bp, synthetic construct
  misc_feature 1..738: note = Synthetic
  source 1..738: mol_type = other DNA
gacatccagatgacacagagcccatcctctgtgtctgcctctgtgggagacagagtgaccatcacctgtagagccagccagggcattgcttcttggctggcctggtatcagcagaagcctggaaaggcccctgagctgctgatctatgctgccagctctctgcaaggtggtgtccccagcagattcagtggcagtggctctggcacagacttcaccctgaccataagcagcctgcagcctgaggactttgccatctactactgccagcaggccaactacttcccctggacatttggccagggcaccaaggtggaaatcaaaggtggtggtggaagtggtggtggtggcagtggtggtggtggaagccagatcaccctgaaagagtctggccccacactggtcaagcccacacagaccctgacactgacctgcaccttctctggcttcagcctgagcaccagtggtgttggagttgtgtggatcagacagcctcctggcaaggccctggaatggctggcactgatctactggaatgaccacaagagatacagccccagcctgggcagcagactgacaatcaccaaggacaccagcaagaaccaggtggtgctgaccatgaccaacatggaccctgtggacacagccacctactattgtgcccactactctggcagctacagctactactactatggcctggatgtgtggggacagggcacaacagtgacagtgtccagt

SEQ ID NO: 588 - DNA, 738 bp, synthetic construct
  misc_feature 1..738: note = Synthetic
  source 1..738: mol_type = other DNA
gacatccagatgacccagagcccaagctctgtgtctgcctcagtgggagacagagtgacaatcacctgcagagccagccagggcattgccagctggctggcctggtaccagcagaagcctggcaaagctcctgaactcctgatctatgctgccagcagcctgcagggtggggtgcctagcaggttctctggctcaggctctggcacagacttcaccctgacaatcagcagcctgcagcctgaggactttgctatctactactgccagcaggccaactacttcccctggacctttggccaaggcaccaaggtggagatcaagggaggaggaggctctggtggaggtggctctgggggagggggcagccagatcaccctgaaggagagtggccctacactggttaagcccacccagacactgacactgacctgcaccttctctggcttcagcctgagcaccagtggagtgggagtggtgtggatcagacagccccctggcaaggccctggaatggctggccctgatctactggaatgatcacaagagatacagccctagcctgggctccagactgaccatcaccaaggacaccagcaaaaaccaggtggtgctgaccatgaccaacatggatccagtggacacagccacctactactgtgcccactactctggcagctacagctactactactatggcctggatgtctggggccaaggcaccacagtcacagtgtccagt

SEQ ID NO: 589 - DNA, 738 bp, synthetic construct
  misc_feature 1..738: note = Synthetic
  source 1..738: mol_type = other DNA
gatatccagatgacacaaagcccttcctctgtgtctgcttcagtgggagacagagtcacaatcacatgcagagccagccagggcattgccagctggctggcctggtaccagcagaagcctggcaaagccccagaactgctgatctatgctgccagcagcctccagggtggggtgcccagcagattctctggctctggctctggcacagacttcaccctgaccatcagcagcctgcagccagaggactttgccatctactactgccagcaggccaactacttcccctggacctttggccagggcaccaaggtggaaatcaaggggggaggaggctctggaggaggaggcagtggtggaggaggcagccagatcaccctgaaggagtctggccctaccctggtgaagcctacccagaccctgaccctgacctgcaccttctctggcttcagcctgagcacaagtggtgtgggagtggtgtggatcagacaaccccctggcaaggctctggagtggctggccctgatctactggaatgaccacaagagatacagccctagcctgggcagcaggctgaccatcaccaaagataccagcaagaaccaggtggtgctgaccatgaccaacatggaccctgttgacacagccacatactactgtgcccactacagtggcagctacagctactactactatggcctggatgtctggggccagggcaccacagtgacagtgtcctca

SEQ ID NO: 590 - DNA, 726 bp, synthetic construct
  misc_feature 1..726: note = Synthetic
  source 1..726: mol_type = other DNA
gacatccagatgacacagagcccctctagcctgtctgcctctgtgggagacagagtgaccatcacctgtagagccagccagagcatcagcagctacctgaactggtatcagcagaagcctggcaaggcccctaaactgctgatctatgctgccagcagcctgcagtctggggtgccctctagattttctggcagtggctctggcacagacttcaccctgaccataagctccctgcagcctgaggactttgccacctactactgtcagcagagctacagcacccctcctatcacctttggccagggcaccagactggaaatcaaaggtggtggtggaagtggtggtggtggcagtggtggtggtggatctgaagtgcagctggtggaaagtggtggtggcctggttcagcctggtggctctctgagactgagctgtgcagcctctggcttcaccttcaacatctttgagatgaactgggtcagacaggccccaggcaaaggcctggaatggatcagctacatcagctccagaggcaccacaacctactatgctgactctgtcagaggcaggttcaccatcagcagagacaatgccaagaacagcctgtacctgcagatgaactccctgagagctgaggacacagcagtgtactactgtgccagggactatgaggctacaatcccctttgacttctggggccagggaaccctggtcacagttagcagt

SEQ ID NO: 591 - DNA, 726 bp, synthetic construct
  misc_feature 1..726: note = Synthetic
  source 1..726: mol_type = other DNA
gacatccagatgacccagagccccagcagcctgtctgcctctgtgggtgacagggtgaccattacctgcagagccagccaaagcatcagcagctacctgaactggtaccagcagaagccaggcaaggcccctaagctgctgatctatgctgccagcagcctgcaatctggagtgcctagcagattcagtggctctggctcaggcacagacttcaccctgaccatctccagcctccagcctgaggattttgccacctactactgccagcagagctacagcaccccccctatcacctttggccagggcaccagactggaaatcaagggaggaggaggctctggaggaggaggctctggagggggaggctctgaggtgcagctggtggagtctgggggaggcctggtgcagcctggaggctccctgaggctgagctgtgctgcctcaggcttcaccttcaacatctttgaaatgaactgggtcagacaggcccctggcaaaggcctggaatggatcagctacatcagcagcagaggcacaacaacatactatgctgactctgtgagaggcaggttcacaatcagcagagacaatgccaagaacagcctgtacctgcagatgaacagcctgagagcagaggatacagctgtgtactactgtgccagagactatgaggccaccatcccctttgatttctggggccagggcaccctggttacagtgtccagt

SEQ ID NO: 592 - DNA, 726 bp, synthetic construct
  misc_feature 1..726: note = Synthetic
  source 1..726: mol_type = other DNA
gatatccaaatgacccagagccccagctccctgtcagcctctgtgggagacagagtgaccatcacatgcagagccagccagagcatcagcagctacctgaactggtaccagcagaagcctggcaaggcccccaagctgctgatctatgctgccagcagcctgcagtctggagtgccttccagattctctggctcaggcagtggcacagacttcaccctgacaatcagcagcctgcagcctgaagactttgccacctactactgccagcagagctacagcacaccacctatcacctttggccagggcaccagactggagatcaaagggggtgggggctctggggggggaggcagtggaggaggtggctctgaagtccagctggtggagtctggaggaggcctggtgcagcctggaggcagcctgaggctgtcctgtgcagcctctggcttcaccttcaacatctttgagatgaactgggttaggcaggcccctggcaagggcctggaatggatcagctacattagcagcagaggcaccacaacctactatgctgactctgtgaggggcagattcaccatcagcagagataatgccaagaacagcctgtacctgcagatgaacagcctcagagctgaggacacagctgtgtactactgtgccagagattatgaggccaccatcccctttgacttctggggccaaggcaccctggtgacagtgtcttct

SEQ ID NO: 593 - DNA, 732 bp, synthetic construct
  misc_feature 1..732: note = Synthetic
  source 1..732: mol_type = other DNA
gacatccagatgacacagagcccctctagcctgtctgcctctgtgggagacagagtgaccatcacctgtagagccagccagagcatcagcagctacctgaactggtatcagcagaagcctggcaaggcccctaaactgctgatctatgctgccagcagcctgcagtctggggtgccctctagattttctggcagtggctctggcacagacttcaccctgaccataagctccctgcagcctgaggactttgccacctactactgtcagcagagctacagcacccctcctatcacctttggccagggcaccagactggaaatcaaaggtggtggtggaagtggtggtggtggcagtggtggtggtggatctgaagtgcagctggtggaaagtggtggtggcctggttcagcctggcagatccctgagactgagctgtgcagcctctggctttacctttgatgactatgccatgaactgggtcagacaggccccaggcaaaggcctggaatgggtgtcaggcatctcttggtcctctggctccatggactatgctgactctgtgaagggcagattcaccatcagcagagacaatgccaagaacagcctgtacctgcagatgaactccctgagaacagaggacacagccctgtactactgtgccaaggccagagaagtgggagactactatggcatggatgtgtggggccagggaaccacagtgacagtcagtagt

SEQ ID NO: 594 - DNA, 732 bp, synthetic construct
  misc_feature 1..732: note = Synthetic
  source 1..732: mol_type = other DNA
gatatccagatgacccagagccccagcagcctgtctgccagtgtgggggatagagtgaccatcacctgcagggccagccagagcatcagcagctacctcaactggtaccagcaaaagcctggcaaggcccccaaactgctgatttatgctgccagcagcctgcagtctggggtcccttccagattctctggctctggctctggcacagacttcaccctgaccatcagcagcctgcagccagaggactttgccacatactactgccagcagagctacagcaccccccctatcacctttggccagggcaccaggctggagatcaagggaggtgggggctcaggaggaggtggctctggaggaggaggctcagaggtgcagctggttgagagtggaggaggcctggtgcagcctggcagaagcctgagactgagctgtgctgcctctggcttcacctttgatgactatgccatgaactgggtgagacaggcccctggcaagggcctggaatgggtgtctggcatctcctggagctctggcagcatggactatgctgactctgtgaagggcaggttcaccatcagcagagacaatgccaagaacagcctgtacctgcagatgaacagcctgagaacagaagacacagccctgtactactgtgcaaaagccagagaagtgggagactactatggcatggatgtgtggggccaaggcaccacagtgacagtgagcagt

SEQ ID NO: 595 - DNA, 732 bp, synthetic construct
  misc_feature 1..732: note = Synthetic
  source 1..732: mol_type = other DNA
gacatccagatgacccagagccccagctccctgtcagccagtgtgggtgacagagtgaccatcacctgcagagccagccagagcatcagcagctacctgaactggtaccagcagaaacctggcaaagcccccaagctgctgatttatgctgctagcagcctgcagagtggagtgcccagcagattctcaggcagtggctctggcacagacttcaccctgaccatctccagcctgcagccagaagactttgccacctactactgccagcagagctacagcacccctcctatcacctttggccagggcacaagactggagatcaagggaggaggaggctctggaggaggaggctctggagggggaggctctgaggtccaactggttgaatctggagggggcctggtgcaacctggcaggagcctgagactgagctgtgctgcctctggcttcacctttgatgactatgccatgaactgggtgagacaggcccctggcaagggcctggagtgggtgtctggcatcagctggagctctggcagcatggactatgcagattctgtgaagggcaggttcaccatcagcagagataatgccaagaacagcctgtacctgcagatgaacagcctcaggacagaggacacagccctgtactactgtgccaaggccagagaagtgggtgactactatggcatggatgtgtggggccagggcaccacagtgacagtgagctct

SEQ ID NO: 596 - DNA, 738 bp, synthetic construct
  misc_feature 1..738: note = Synthetic
  source 1..738: mol_type = other DNA
gacatccagatgacccagtctccatcttccgtgtctgcatctgtaggagacagagtcaccatcacttgtcgggcgagtcagggtattgccagctggttagcctggtatcagcagaaaccagggaaagcccctgagctcctgatctatgctgcatccagtttgcaaggtggggtcccatcaaggttcagcggcagtggatctgggacagatttcactctcaccatcagcagcctgcagcctgaagattttgcaatttactattgtcaacaggctaactatttcccgtggacgttcggccaagggaccaaggtggaaatcaaaggcggcggcggaagcggagggggaggatcaggaggaggcggatcccagatcaccttgaaggagtctggtcctacgctggtgaaacccacacagaccctcacgctgacctgcaccttctctgggttctcactcagcactagtggagtgggtgtggtctggatccgtcagccccccggaaaggccctggagtggcttgcactcatttattggaatgatcataagcggtacagcccatctctggggagcaggctcaccatcaccaaggacacctccaaaaaccaggtggtccttacaatgaccaacatggaccctgtggacacagccacatattactgtgcacactacagtgggagctattcctactactactatggtttggacgtctggggccaagggaccacggtcaccgtctcctca

SEQ ID NO: 597 - DNA, 747 bp, synthetic construct
  misc_feature 1..747: note = Synthetic
  source 1..747: mol_type = other DNA
gacatccagatgacccagtctccatcctccctgtctgcatctgtaggagacagagtcaccatcacttgccgggcaagtcagagcattagcagctatttaaattggtatcagcagaaaccagggaaagcccctaagctcctgatctatgctgcatccagtttgcaaagtggggtcccgtcaaggttcagtggcagtggatctgggacagatttcactctcaccatcagcagtctgcaacctgaagattttgcaacttactactgtcaacagagttacagtacccctccgatcaccttcggccaagggacacgactggagattaaaggcggcggcggaagcggagggggaggatcaggaggaggcggatcccaggtgcagctggtggagtctgggggaggcgtggtccagcctggaaggtccctgagactctcctgcgcagcctctggattcccctttagtaattatgtcatgtattgggtccgccaggctccaggcaaggggctggagtgggtggctcttattttttttgacggaaagaaaaactatcatgcagactccgtgaagggccgattcaccataaccagagacaattccaaaaatatgttatatctgcaaatgaacagcctgagacctgaggacgcggctgtgtattactgtgcgaaaatccattgtcctaatggtgtatgttacaaggggtattacggaatggacgtctggggccaagggaccacggtcaccgtctcctca

SEQ ID NO: 598 - DNA, 726 bp, synthetic construct
  misc_feature 1..726: note = Synthetic
  source 1..726: mol_type = other DNA
gacatccagatgacccagtctccatcctccctgtctgcatctgtaggagacagagtcaccatcacttgccgggcaagtcagagcattagcagctatttaaattggtatcagcagaaaccagggaaagcccctaagctcctgatctatgctgcatccagtttgcaaagtggggtcccgtcaaggttcagtggcagtggatctgggacagatttcactctcaccatcagcagtctgcaacctgaagattttgcaacttactactgtcaacagagttacagtacccctccgatcaccttcggccaagggacacgactggagattaaaggcggcggcggaagcggagggggaggatcaggaggaggcggatccgaggtgcagctggtggagtctgggggaggcttagtacagcctggagggtccctaagactctcctgtgcagcctctggattcaccttcaatatttttgaaatgaactgggtccgccaggctccagggaaggggctggagtggatttcctacattagtagtcgtggaactaccacatactacgcagactctgtgaggggccgattcaccatctccagagacaacgccaagaactcactgtatctgcaaatgaacagcctgagagccgaggacacggctgtttattactgtgcgagagattatgaagcaacaatcccttttgacttctggggccagggaaccctggtcaccgtctcctca

SEQ ID NO: 599 - DNA, 732 bp, synthetic construct
  misc_feature 1..732: note = Synthetic
  source 1..732: mol_type = other DNA
gacatccagatgacccagtctccatcctccctgtctgcatctgtaggagacagagtcaccatcacttgccgggcaagtcagagcattagcagctatttaaattggtatcagcagaaaccagggaaagcccctaagctcctgatctatgctgcatccagtttgcaaagtggggtcccgtcaaggttcagtggcagtggatctgggacagatttcactctcaccatcagcagtctgcaacctgaagattttgcaacttactactgtcaacagagttacagtacccctccgatcaccttcggccaagggacacgactggagattaaaggcggcggcggaagcggagggggaggatcaggaggaggcggatccgaagtgcagctggtggagtctgggggaggcttggttcagcctggcaggtccctgagactctcctgtgcagcctctggattcacctttgatgattatgccatgaactgggtccggcaagctccagggaagggcctggagtgggtctcaggtattagttggagtagtggtagcatggactatgcggactctgtgaagggccgattcaccatctccagagacaacgccaaaaactccctgtatctgcaaatgaacagtctgagaactgaggacacggccttatattactgtgcaaaagctagggaagttggagactactacggtatggacgtctggggccaagggaccacggtcaccgtctcctca

SEQ ID NO: 600 - protein, 5 aa, synthetic construct
  REGION 1..5: note = Synthetic
GGGGS

SEQ ID NO: 601 - protein, 107 aa, synthetic construct [sequence omitted]

SEQ ID NO: 602 - protein, 107 aa, synthetic construct
  REGION 1..107: note = Synthetic
ASTKGPSVFPLAPSSKSTSGGTAALGCLVKDYFPEPVTVSWNSGALTSGVHTFPAVLQSSGLYSLSSVVTVPSSSLGTQTYICNVNHKPSNTKVDKKVEPKSCDKTH

SEQ ID NO: 603 - protein, 214 aa, synthetic construct
  REGION 1..214: note = Synthetic
DIQMTQSPSSLSASVGDRVTITCRASQGISNYLAWYQQKPGKVPNLLIYAASTLQSGVPSRFSGSGSGTDFTLTISSLQPEDVATYYCQKYNSAPLTFGGGTKVEIKRTVAAPSVFIFPPSDEQLKSGTASVVCLLNNFYPREAKVQWKVDNALQSGNSQESVTEQDSKDSTYSLSSTLTLSKADYEKHKVYACEVTHQGLSSPVTKSFNRGEC

SEQ ID NO: 604 - protein, 228 aa, synthetic construct
  REGION 1..228: note = Synthetic
EVQLVESGGGLVQPGGSLRLSCAASGFAFSSYAMTWVRQAPGKGLEWVSVISGTGGSTYYADSVKGRFTISRDNSKNTLYLQMNSLRAEDTAVYYCAKGGAARRMEYFQYWGQGTLVTVSSASTKGPSVFPLAPSSKSTSGGTAALGCLVKDYFPEPVTVSWNSGALTSGVHTFPAVLQSSGLYSLSSVVTVPSSSLGTQTYICNVNHKPSNTKVDKKVEPKSCDKTH

SEQ ID NO: 605 - protein, 214 aa, synthetic construct
  REGION 1..214: note = Synthetic
DIQMTQSPSSLSASIGDRVTITCRASQGISNYLAWYQQKPGKVPKLLIYAASTLQSGVPSRFSGSGSGTDFTLTISSLQPEDVATYYCQNHNSVPLTFGGGTKVEIKRTVAAPSVFIFPPSDEQLKSGTASVVCLLNNFYPREAKVQWKVDNALQSGNSQESVTEQDSKDSTYSLSSTLTLSKADYEKHKVYACEVTHQGLSSPVTKSFNRGEC

SEQ ID NO: 606 - protein, 228 aa, synthetic construct
  REGION 1..228: note = Synthetic
EVQLVESGGGLVQPGGSLRLSCAASGFTFNSYAMTWVRQAPGKGLEWVSFIGGSTGNTYYAGSVKGRFTISSDNSKKTLYLQMNSLRAEDTAVYYCAKGGAARRMEYFQHWGQGTLVTVSSASTKGPSVFPLAPSSKSTSGGTAALGCLVKDYFPEPVTVSWNSGALTSGVHTFPAVLQSSGLYSLSSVVTVPSSSLGTQTYICNVNHKPSNTKVDKKVEPKSCDKTH

SEQ ID NO: 607 - protein, 214 aa, synthetic construct
  REGION 1..214: note = Synthetic
DIQMTQSPSSLSASVGDRVTITCRASQSIRNVLGWFQQKPGKAPQRLIYAASSLQSGVPSRFSGSGSGTEFTLTISSLQPEDFATYYCLQHNFYPLTFGGGTKVEIKRTVAAPSVFIFPPSDEQLKSGTASVVCLLNNFYPREAKVQWKVDNALQSGNSQESVTEQDSKDSTYSLSSTLTLSKADYEKHKVYACEVTHQGLSSPVTKSFNRGEC

SEQ ID NO: 608 - protein, 229 aa, synthetic construct
  REGION 1..229: note = Synthetic
QVQLVESGGGVVQPGRSLRLSCAASGFTFTTYGMHWVRQAPGKGLEWVAVIWYDGSNKYYGDSVKGRFTISRDNSKNTLYLQMNSLRVDDTAVYYCTRTHGYTRSSDGFDYWGQGTLVTVSSASTKGPSVFPLAPSSKSTSGGTAALGCLVKDYFPEPVTVSWNSGALTSGVHTFPAVLQSSGLYSLSSVVTVPSSSLGTQTYICNVNHKPSNTKVDKKVEPKSCDKTH

SEQ ID NO: 609 - protein, 214 aa, synthetic construct
  REGION 1..214: note = Synthetic
EIVLTQSPATLSLSPGERATLSCRASQSVSSYLAWYQQKPGQAPRLLIHDVSNRATGIPARFSGSGSGTDFTLTISSLEPEDFVVYYCQQRSDWPITFGQGTRLEIKRTVAAPSVFIFPPSDEQLKSGTASVVCLLNNFYPREAKVQWKVDNALQSGNSQESVTEQDSKDSTYSLSSTLTLSKADYEKHKVYACEVTHQGLSSPVTKSFNRGEC

SEQ ID NO: 610 - protein, 230 aa, synthetic construct
  REGION 1..230: note = Synthetic
EVQLVESGGGLVQPGRSLRLSCAASGFTFDDKAMHWVRQVPGKGLEWISGISWNSGTIGYADSVKGRFIISRDNAKNSLYLQMNSLRAEDTALYYCAKDGDTSGWYWYGLDVWGQGTTVTVSSASTKGPSVFPLAPSSKSTSGGTAALGCLVKDYFPEPVTVSWNSGALTSGVHTFPAVLQSSGLYSLSSVVTVPSSSLGTQTYICNVNHKPSNTKVDKKVEPKSCDKTH

SEQ ID NO: 611 - protein, 214 aa, synthetic construct
  REGION 1..214: note = Synthetic
DIQLTQSPSSLSASVGDRVTITCWASQGISSYLAWYQQKPGKAPKLLIYAASTLQSGVPSRFSGSGSGTEFTLTISSLQPEDFATYYCQQLNSYPLTFGGGTKVEIKRTVAAPSVFIFPPSDEQLKSGTASVVCLLNNFYPREAKVQWKVDNALQSGNSQESVTEQDSKDSTYSLSSTLTLSKADYEKHKVYACEVTHQGLSSPVTKSFNRGEC

SEQ ID NO: 612 - protein, 227 aa, synthetic construct
  REGION 1..227: note = Synthetic
QVQLVESGGGVVQPGRSLRLSCIASGFTFSVYGIHWVRQAPGKGLEWMAVISHDGNIKHYADSVKGRFTISRDNSKNTLYLQINSLRTEDTAVYYCAKDTWNSLDTFDIWGQGTMVTVSSASTKGPSVFPLAPSSKSTSGGTAALGCLVKDYFPEPVTVSWNSGALTSGVHTFPAVLQSSGLYSLSSVVTVPSSSLGTQTYICNVNHKPSNTKVDKKVEPKSCDKTH

SEQ ID NO: 613 - protein, 214 aa, synthetic construct
  REGION 1..214: note = Synthetic
AIQMTQSPSSLSASVGDRVTITCRASQGIRNDLGWYQQKPGKAPKLLIYAASTLQSGVPSRFSGSGSGTDFTLTISSLQPEDFATYYCLQDYNYPFTFGPGTKVDIKRTVAAPSVFIFPPSDEQLKSGTASVVCLLNNFYPREAKVQWKVDNALQSGNSQESVTEQDSKDSTYSLSSTLTLSKADYEKHKVYACEVTHQGLSSPVTKSFNRGEC

SEQ ID NO: 614 - protein, 227 aa, synthetic construct
  REGION 1..227: note = Synthetic
QVTLRESGPALVKPSQTLTLTCTFSGFSLNTYGMFVSWIRQPPGKALEWLAHIHWDDDKYYSTSLKTRLTISKDTSKNQVVLTMTNMDPVDTATYYCARGHNNLNYIIHWGQGTLVTVSSASTKGPSVFPLAPSSKSTSGGTAALGCLVKDYFPEPVTVSWNSGALTSGVHTFPAVLQSSGLYSLSSVVTVPSSSLGTQTYICNVNHKPSNTKVDKKVEPKSCDKTH

SEQ ID NO: 615 - protein, 214 aa, synthetic construct
  REGION 1..214: note = Synthetic
EIVMTQSPATLSVSPGERATLSCRASQSVSSNFAWYQQKPGQAPRLLIYSASSRATGIPVRFSGSGSGTEFTLTISSLQSEDFAVYYCQQYNIWPRTFGQGTKVEIKRTVAAPSVFIFPPSDEQLKSGTASVVCLLNNFYPREAKVQWKVDNALQSGNSQESVTEQDSKDSTYSLSSTLTLSKADYEKHKVYACEVTHQGLSSPVTKSFNRGEC

SEQ ID NO: 616 - protein, 223 aa, synthetic construct
  REGION 1..223: note = Synthetic
EVQLVESGGGLVQPGGSLRLSCAVSGFIFSSYEMNWVRQAPGKGLEWVSYISSSGSTIFYADSVKGRFTISRDNAKNSLYLQMNSLRAEDTAVYYCVSGVVLFDVWGQGTMVTVSSASTKGPSVFPLAPSSKSTSGGTAALGCLVKDYFPEPVTVSWNSGALTSGVHTFPAVLQSSGLYSLSSVVTVPSSSLGTQTYICNVNHKPSNTKVDKKVEPKSCDKTH

SEQ ID NO: 617 - protein, 214 aa, synthetic construct
  REGION 1..214: note = Synthetic
DIQMTQSPSSVSASVGDRVTITCRASQGISSWLAWYQQKPGKAPKLLIYAASSLQSGVPSRFSGSGSGTDFTLTISSLQPEDFATYYCQKANSFPYTFGQGTKLEIKRTVAAPSVFIFPPSDEQLKSGTASVVCLLNNFYPREAKVQWKVDNALQSGNSQESVTEQDSKDSTYSLSSTLTLSKADYEKHKVYACEVTHQGLSSPVTKSFNRGEC

SEQ ID NO: 618 - protein, 232 aa, synthetic construct
  REGION 1..232: note = Synthetic
EVQLVESGGGLVQPGGSLRLSCAASGFTFSNYWMTWVRQAPGKGLEWVANIKEDGSEKDYVDSVKGRFTISRDNAKNSLYLQMNSLRGEDTAVYYCARDGEQLVDYYYYYVMDVWGQGTTVTVSSASTKGPSVFPLAPSSKSTSGGTAALGCLVKDYFPEPVTVSWNSGALTSGVHTFPAVLQSSGLYSLSSVVTVPSSSLGTQTYICNVNHKPSNTKVDKKVEPKSCDKTH

SEQ ID NO: 619 - protein, 214 aa, synthetic construct
  REGION 1..214: note = Synthetic
DIQMTQSPSSLSASVGDRVTITCRASQSISSYLNWYQQKPGKAPKVLIYAASSLQSGVPSRFSGSGSGTDFTLTISSLQPEDFATYYCQQSYSIPLTFGGGTKVEIKRTVAAPSVFIFPPSDEQLKSGTASVVCLLNNFYPREAKVQWKVDNALQSGNSQESVTEQDSKDSTYSLSSTLTLSKADYEKHKVYACEVTHQGLSSPVTKSFNRGEC

SEQ ID NO: 620 - protein, 234 aa, synthetic construct
  REGION 1..234: note = Synthetic
EVQLVESGGGLVQPGRSLRLSCAASGFTFDDYAMHWVRQAPGKGLEWVSGISWNSGYIGYADSVKGRFTISRDNAENSLHLQMNSLRAEDTALYYCARGGSTLVRGVKGGYYGMDVWGQGTTVTVSSASTKGPSVFPLAPSSKSTSGGTAALGCLVKDYFPEPVTVSWNSGALTSGVHTFPAVLQSSGLYSLSSVVTVPSSSLGTQTYICNVNHKPSNTKVDKKVEPKSCDKTH

SEQ ID NO: 621 - protein, 214 aa, synthetic construct
  REGION 1..214: note = Synthetic
DIQMTQSPSSLSASVGDRVTITCRASQSIDRYLNWYRQKPGKAPKLLIYTTSSLQSGVPSRFSGSGSGTDFTLTLSSLQPEDFATYYCQQSYSPPLTFGGGTKVEIKRTVAAPSVFIFPPSDEQLKSGTASVVCLLNNFYPREAKVQWKVDNALQSGNSQESVTEQDSKDSTYSLSSTLTLSKADYEKHKVYACEVTHQGLSSPVTKSFNRGEC

SEQ ID NO: 622 - protein, 224 aa, synthetic construct
  REGION 1..224: note = Synthetic
QVQLVESGGGVVQPGRSLRLSCAASGFTFSSYGMHWVRQAPGKGLEWVAVIWYDGSNKYYADSVKGRFTISRDISKNTLYLQMNSLRAEDTAVYYCAGQLDLFFDYWGQGTLVTVSSASTKGPSVFPLAPSSKSTSGGTAALGCLVKDYFPEPVTVSWNSGALTSGVHTFPAVLQSSGLYSLSSVVTVPSSSLGTQTYICNVNHKPSNTKVDKKVEPKSCDKTH

SEQ ID NO: 623 - protein, 214 aa, synthetic construct
  REGION 1..214: note = Synthetic
DIQMTQSPSSVSASVGDRVTITCRASQGISSWLAWYQQKPGKAPKLLIYAASSLQSGVPSRFSGSGSGTDFTLTISSLQPEDFATYYCQKADSLPYAFGQGTKLEIKRTVAAPSVFIFPPSDEQLKSGTASVVCLLNNFYPREAKVQWKVDNALQSGNSQESVTEQDSKDSTYSLSSTLTLSKADYEKHKVYACEVTHQGLSSPVTKSFNRGEC

SEQ ID NO: 624 - protein, 232 aa, synthetic construct
  REGION 1..232: note = Synthetic
EVQLVESGGGLVQPGGSLRLSCTASGFTFSNYWMTWVRQAPGKGLEWVANIKEDGSEKEYVDSVKGRFTISRDNAKNSLYLQMNSLRGEDTAVYYCARDGEQLVDYYYYYVMDVWGQGTTVTVSSASTKGPSVFPLAPSSKSTSGGTAALGCLVKDYFPEPVTVSWNSGALTSGVHTFPAVLQSSGLYSLSSVVTVPSSSLGTQTYICNVNHKPSNTKVDKKVEPKSCDKTH

SEQ ID NO: 625 - protein, 214 aa, synthetic construct
  REGION 1..214: note = Synthetic
DIQMTQSPSSLSASVGDRVTITCRASQGIRDHFGWYQQKPGKAPKRLIYAASSLHSGVPSRFSGSGSGTEFTLTISSLQPEDFATYYCLQYDTYPLTFGGGTKVEIKRTVAAPSVFIFPPSDEQLKSGTASVVCLLNNFYPREAKVQWKVDNALQSGNSQESVTEQDSKDSTYSLSSTLTLSKADYEKHKVYACEVTHQGLSSPVTKSFNRGEC

SEQ ID NO: 626 - protein, 228 aa, synthetic construct
  REGION 1..228: note = Synthetic
EVQLVESGGGLVQPGGSLRLSCATSGFTFTSYDMKWVRQAPGLGLEWVSAISGSGGNTYYADSVKGRFTISRDNSRNTLYLQMNSLRAEDTAVYYCTRSHDFGAFDYFDYWGQGTLVTVSSASTKGPSVFPLAPSSKSTSGGTAALGCLVKDYFPEPVTVSWNSGALTSGVHTFPAVLQSSGLYSLSSVVTVPSSSLGTQTYICNVNHKPSNTKVDKKVEPKSCDKTH

SEQ ID NO: 627 - protein, 215 aa, synthetic construct
  REGION 1..215: note = Synthetic
EIVMTQSPATLSVSPGERATLSCRASQTVSSNLAWYQQKPGQAPRLLIYGSSSRATGIPARFSGSGSGTEFTLTISSLQSEDFAVYYCQQYNNWPPYTFGQGTKLEIKRTVAAPSVFIFPPSDEQLKSGTASVVCLLNNFYPREAKVQWKVDNALQSGNSQESVTEQDSKDSTYSLSSTLTLSKADYEKHKVYACEVTHQGLSSPVTKSFNRGEC

SEQ ID NO: 628 - protein, 229 aa, synthetic construct
  REGION 1..229: note = Synthetic
EVQLVESGGDLVQPGRSLRLSCAASGFTFDDYAMHWVRQAPGKGLEWVSGISWNSATRVYADSVKGRFTISRDNAKNFLYLQMNSLRSEDTALYHCAKDMDISLGYYGLDVWGQGTTVTVSSASTKGPSVFPLAPSSKSTSGGTAALGCLVKDYFPEPVTVSWNSGALTSGVHTFPAVLQSSGLYSLSSVVTVPSSSLGTQTYICNVNHKPSNTKVDKKVEPKSCDKTH

SEQ ID NO: 629 - protein, 214 aa, synthetic construct
  REGION 1..214: note = Synthetic
DIQMTQSPSSVSASVGDRVTITCRASQGIASWLAWYQQKPGKAPELLIYAASSLQGGVPSRFSGSGSGTDFTLTISSLQPEDFAIYYCQQANYFPWTFGQGTKVEIKRTVAAPSVFIFPPSDEQLKSGTASVVCLLNNFYPREAKVQWKVDNALQSGNSQESVTEQDSKDSTYSLSSTLTLSKADYEKHKVYACEVTHQGLSSPVTKSFNRGEC

SEQ ID NO: 630 - protein, 231 aa, synthetic construct
  REGION 1..231: note = Synthetic
QITLKESGPTLVKPTQTLTLTCTFSGFSLSTSGVGVVWIRQPPGKALEWLALIYWNDHKRYSPSLGSRLTITKDTSKNQVVLTMTNMDPVDTATYYCAHYSGSYSYYYYGLDVWGQGTTVTVSSASTKGPSVFPLAPSSKSTSGGTAALGCLVKDYFPEPVTVSWNSGALTSGVHTFPAVLQSSGLYSLSSVVTVPSSSLGTQTYICNVNHKPSNTKVDKKVEPKSCDKTH

SEQ ID NO: 631 - protein, 214 aa, synthetic construct
  REGION 1..214: note = Synthetic
DIQMTQSPSSLSASVGDRVTITCRASQGIRTDLGWYQQKPGKAPKRLIYAASSLQSGVPSRFSGSGSGTEFTLTISSLRPEDFATFYCLQYNSYPLTFGGGTKVEIKRTVAAPSVFIFPPSDEQLKSGTASVVCLLNNFYPREAKVQWKVDNALQSGNSQESVTEQDSKDSTYSLSSTLTLSKADYEKHKVYACEVTHQGLSSPVTKSFNRGEC

SEQ ID NO: 632 - protein, 228 aa, synthetic construct
  REGION 1..228: note = Synthetic
EVQLLESGGALVQPGGSLRLSCAASGFTFTSYAMHWVRQAPGKGLEWVSSIRGSGGGTYSADSVKGRFTISRDNSRDTLYLQMNSVRAEDTAVYYCARSHDYGAFDFFDYWGQGTLVTVSSASTKGPSVFPLAPSSKSTSGGTAALGCLVKDYFPEPVTVSWNSGALTSGVHTFPAVLQSSGLYSLSSVVTVPSSSLGTQTYICNVNHKPSNTKVDKKVEPKSCDKTH

SEQ ID NO: 633 - protein, 214 aa, synthetic construct
  REGION 1..214: note = Synthetic
EIVMTQSPATLSVSPGERATLSCRASQSVSINLAWYQQKPGQAPRLLIFVASTRATGIPARFSGSGSGTEFTLTISSLQSEDFATYYCQQYDIWPYTFGQGTKLEIKRTVAAPSVFIFPPSDEQLKSGTASVVCLLNNFYPREAKVQWKVDNALQSGNSQESVTEQDSKDSTYSLSSTLTLSKADYEKHKVYACEVTHQGLSSPVTKSFNRGEC

SEQ ID NO: 634 - protein, 223 aa, synthetic construct
  REGION 1..223: note = Synthetic
QVQLVESGGGLVKPGGSLRLSCAASGFTFSDYFMSWIRQAPGKGLEWVSYISSTGSTINYADSVKGRFTISRDNVKNSLYLQMTSLRVEDTAVYYCTRDNWNYEYWGQGTLVTVSSASTKGPSVFPLAPSSKSTSGGTAALGCLVKDYFPEPVTVSWNSGALTSGVHTFPAVLQSSGLYSLSSVVTVPSSSLGTQTYICNVNHKPSNTKVDKKVEPKSCDKTH

SEQ ID NO: 635 - protein, 214 aa, synthetic construct
  REGION 1..214: note = Synthetic
DIQMTQSPSSLSASVGDRVTINCRASQGIRNDLGWYQQKPGKAPKRLIYAASSLQSGVPLRFSGSGSGTEFTLTINNLQPEDFATYYCLSHNSYPWTFGQGTKVEIKRTVAAPSVFIFPPSDEQLKSGTASVVCLLNNFYPREAKVQWKVDNALQSGNSQESVTEQDSKDSTYSLSSTLTLSKADYEKHKVYACEVTHQGLSSPVTKSFNRGEC

SEQ ID NO: 636 - protein, 230 aa, synthetic construct
  REGION 1..230: note = Synthetic
QLQLQESGPGLVKPSETLSLTCTVSGESISSNTYYWGWIRQPPGKGLEWIGSIDYSGTTNYNPSLKSRVTISVDTSRNHFSLRLRSVTAADTAVYYCAREWGNYGYYYGMDVWGQGTTVTVSSASTKGPSVFPLAPSSKSTSGGTAALGCLVKDYFPEPVTVSWNSGALTSGVHTFPAVLQSSGLYSLSSVVTVPSSSLGTQTYICNVNHKPSNTKVDKKVEPKSCDKTH

SEQ ID NO: 637 - protein, 214 aa, synthetic construct
  REGION 1..214: note = Synthetic
DIQMTQSPPSVSASVGDRVTITCRASQGISSWLAWYQQKPGKAPKLLIYAASSLQSGVPSRFSGSGSGTDFTLTISSLQPEDFATYYCQQANSFPRTFGQGTKVEIKRTVAAPSVFIFPPSDEQLKSGTASVVCLLNNFYPREAKVQWKVDNALQSGNSQESVTEQDSKDSTYSLSSTLTLSKADYEKHKVYACEVTHQGLSSPVTKSFNRGEC

SEQ ID NO: 638 - protein, 225 aa, synthetic construct
  REGION 1..225: note = Synthetic
QVQLVQSGAEVKKPGSSVRVSCKASRGTFSSYAISWVRQAPGQGLEWMGGIIPIFGTANYAQKFLARVTITADESTSTAYMELSSLRSEDTAVYYCAREKGWNYFDYWGQGTLVTVSSASTKGPSVFPLAPSSKSTSGGTAALGCLVKDYFPEPVTVSWNSGALTSGVHTFPAVLQSSGLYSLSSVVTVPSSSLGTQTYICNVNHKPSNTKVDKKVEPKSCDKTH

SEQ ID NO: 639 - protein, 219 aa, synthetic construct
  REGION 1..219: note = Synthetic
DIVMTQSPLSLPVTPGEPASISCRSSQSLLHGNGYNYLTWYLQKPGQSPQLLIYLGSNRASGVPDRFSGSGSGTDFTLKISRVEAEDVGVYYCMQALQTPYTFGQGTKLEIKRTVAAPSVFIFPPSDEQLKSGTASVVCLLNNFYPREAKVQWKVDNALQSGNSQESVTEQDSKDSTYSLSSTLTLSKADYEKHKVYACEVTHQGLSSPVTKSFNRGEC

SEQ ID NO: 640 - protein, 230 aa, synthetic construct
  REGION 1..230: note = Synthetic
QVQLVESGGGLVKPGGSLRLSCAASGFTFSDYYMNWIRQAPGKGLEWVSYISSSGTTIYYADSVKGRFTISRDNAKKSLYLEMNSLRAEDTAVYYCAREGYGNDYYYYGIDVWGQGTTVTVSSASTKGPSVFPLAPSSKSTSGGTAALGCLVKDYFPEPVTVSWNSGALTSGVHTFPAVLQSSGLYSLSSVVTVPSSSLGTQTYICNVNHKPSNTKVDKKVEPKSCDKTH

SEQ ID NO: 641 - protein, 215 aa, synthetic construct
  REGION 1..215: note = Synthetic
DIQMTQSPSSLSASVGDRVTITCRASQSISSYLNWYQQKPGKAPKLLIYAASSLQSGVPSRFSGSGSGTDFTLTISSLQPEDFATYYCQQSYSTPPITFGQGTRLEIKRTVAAPSVFIFPPSDEQLKSGTASVVCLLNNFYPREAKVQWKVDNALQSGNSQESVTEQDSKDSTYSLSSTLTLSKADYEKHKVYACEVTHQGLSSPVTKSFNRGEC

SEQ ID NO: 642 - protein, 229 aa, synthetic construct
  REGION 1..229: note = Synthetic
QVQLVESGGGVVQPGRSLRLSCAASGFTFSSFGMHWVRQAPGKGLEWVIFISYDGSDKYYADSVKGRFAISRDSSKNTLYLQMNSLRAEDTAVYYCAKENGILTDSYGMDVWGQGTTVTVSSASTKGPSVFPLAPSSKSTSGGTAALGCLVKDYFPEPVTVSWNSGALTSGVHTFPAVLQSSGLYSLSSVVTVPSSSLGTQTYICNVNHKPSNTKVDKKVEPKSCDKTH

SEQ ID NO: 643 - protein, 215 aa, synthetic construct; identical to SEQ ID NO: 641
  REGION 1..215: note = Synthetic

SEQ ID NO: 644 - protein, 231 aa, synthetic construct
  REGION 1..231: note = Synthetic
QVQLVQSGAEVKKPGASVKVSCKASGYTFTSYGISWVRQAPGQGLEWMGWISVYHGNTNYAQKFQGRVTMTTDTSTSTAYMELRSLRSDDTAVYYCAREGYYDFWSGYYPFDYWGQGTLVTVSSASTKGPSVFPLAPSSKSTSGGTAALGCLVKDYFPEPVTVSWNSGALTSGVHTFPAVLQSSGLYSLSSVVTVPSSSLGTQTYICNVNHKPSNTKVDKKVEPKSCDKTH

SEQ ID NO: 645 - protein, 215 aa, synthetic construct; identical to SEQ ID NO: 641
  REGION 1..215: note = Synthetic

SEQ ID NO: 646 - protein, 225 aa, synthetic construct
  REGION 1..225: note = Synthetic
EVQLVESGGGLIQPGGSLRLSCEASGFTFRNYEMNWVRQAPGKGLEWVSYISSSGNMKDYAESVKGRFTISRDNVKNSLQLQMNSLRVEDTAVYYCARDEFPYGMDVWGQGTTVTVSSASTKGPSVFPLAPSSKSTSGGTAALGCLVKDYFPEPVTVSWNSGALTSGVHTFPAVLQSSGLYSLSSVVTVPSSSLGTQTYICNVNHKPSNTKVDKKVEPKSCDKTH

SEQ ID NO: 647 - protein, 215 aa, synthetic construct; identical to SEQ ID NO: 641
  REGION 1..215: note = Synthetic

SEQ ID NO: 648 - protein, 228 aa, synthetic construct
  REGION 1..228: note = Synthetic
EVQLVESGGGLVQPGRSLRLSCAASGFTFDDYAMNWVRQAPGKGLEWVSGISWSSGSMDYADSVKGRFTISRDNAKNSLYLQMNSLRTEDTALYYCAKAREVGDYYGMDVWGQGTTVTVSSASTKGPSVFPLAPSSKSTSGGTAALGCLVKDYFPEPVTVSWNSGALTSGVHTFPAVLQSSGLYSLSSVVTVPSSSLGTQTYICNVNHKPSNTKVDKKVEPKSCDKTH

SEQ ID NO: 649 - protein, 215 aa, synthetic construct
  REGION 1..215: note = Synthetic
EIVLTQSPGTLSLSPGERATLSCRASQSVSSSYLAWYQQKPGQAPRLLIYGASSRATGIPDRFSGSGSGTDFTLTISRLEPEDFAVYYCQQYGSSPWTFGQGTKVEIKRTVAAPSVFIFPPSDEQLKSGTASVVCLLNNFYPREAKVQWKVDNALQSGNSQESVTEQDSKDSTYSLSSTLTLSKADYEKHKVYACEVTHQGLSSPVTKSFNRGEC

SEQ ID NO: 650 - protein, 226 aa, synthetic construct
  REGION 1..226: note = Synthetic
EVQLVESGGGLVQPGRSLTLSCAASGFTFDNFGMHWVRQGPGKGLEWVSGLTWNSGVIGYADSVKGRFTISRDNAKNSLYLQMNSLRPEDTALYYCAKDIRNYGPFDYWGQGTLVTVSSASTKGPSVFPLAPSSKSTSGGTAALGCLVKDYFPEPVTVSWNSGALTSGVHTFPAVLQSSGLYSLSSVVTVPSSSLGTQTYICNVNHKPSNTKVDKKVEPKSCDKTH

SEQ ID NO: 651 - protein, 215 aa, synthetic construct; identical to SEQ ID NO: 641
  REGION 1..215: note = Synthetic

SEQ ID NO: 652 - protein, 226 aa, synthetic construct
  REGION 1..226: note = Synthetic
EVQLVESGGGLVQPGGSLRLSCAASGFTFNIFEMNWVRQAPGKGLEWISYISSRGTTTYYADSVRGRFTISRDNAKNSLYLQMNSLRAEDTAVYYCARDYEATIPFDFWGQGTLVTVSSASTKGPSVFPLAPSSKSTSGGTAALGCLVKDYFPEPVTVSWNSGALTSGVHTFPAVLQSSGLYSLSSVVTVPSSSLGTQTYICNVNHKPSNTKVDKKVEPKSCDKTH

SEQ ID NO: 653 - protein, 215 aa, synthetic construct; identical to SEQ ID NO: 641
  REGION 1..215: note = Synthetic

SEQ ID NO: 654 - protein, 228 aa, synthetic construct
  REGION 1..228: note = Synthetic
EVQLVESGGSVVRPGGSLRLSCEASGFTFDDYGMSWVRQDPGKGLEWVSGINWNGDRTNYADSVKGRFIISRDNAKNSVYLQMNSLRAEDSALYHCARDQGLGVAATLDYWGQGTLVTVSSASTKGPSVFPLAPSSKSTSGGTAALGCLVKDYFPEPVTVSWNSGALTSGVHTFPAVLQSSGLYSLSSVVTVPSSSLGTQTYICNVNHKPSNTKVDKKVEPKSCDKTH

SEQ ID NO: 655 - protein, 215 aa, synthetic construct; identical to SEQ ID NO: 641
  REGION 1..215: note = Synthetic

SEQ ID NO: 656 - protein, 235 aa, synthetic construct
  REGION 1..235: note = Synthetic
EVQLVESGGGLVQPGGSLRLSCAASGFTVSNYEMNWVRQAPGKGLEWVSYISSSTSNIYYADSVKGRFTISRDNAENSLYLQMNSLRVEDTAVYYCVRDGIVVVPVGRGYYYYGLDVWGQGTTVTVSSASTKGPSVFPLAPSSKSTSGGTAALGCLVKDYFPEPVTVSWNSGALTSGVHTFPAVLQSSGLYSLSSVVTVPSSSLGTQTYICNVNHKPSNTKVDKKVEPKSCDKTH

SEQ ID NO: 657 - protein, 215 aa, synthetic construct; identical to SEQ ID NO: 641
  REGION 1..215: note = Synthetic

SEQ ID NO: 658 - protein, 233 aa, synthetic construct
  REGION 1..233: note = Synthetic
QVQLVESGGGVVQPGRSLRLSCAASGFPFSNYVMYWVRQAPGKGLEWVALIFFDGKKNYHADSVKGRFTITRDNSKNMLYLQMNSLRPEDAAVYYCAKIHCPNGVCYKGYYGMDVWGQGTTVTVSSASTKGPSVFPLAPSSKSTSGGTAALGCLVKDYFPEPVTVSWNSGALTSGVHTFPAVLQSSGLYSLSSVVTVPSSSLGTQTYICNVNHKPSNTKVDKKVEPKSCDKTH

SEQ ID NO: 659 - protein, 215 aa, synthetic construct; identical to SEQ ID NO: 641
  REGION 1..215: note = Synthetic

SEQ ID NO: 660 - protein, 232 aa, synthetic construct
  REGION 1..232: note = Synthetic
EVQLVESGGGLVQPGGSLRLSCAASGFTFSNYWMNWVRQAPGKGLEWVANIKEDGGKKLYVDSVKGRFTISRDNAKNSLFLQMNSLRAEDTAVYYCAREDTTLVVDYYYYGMDVWGQGTTVTVSSASTKGPSVFPLAPSSKSTSGGTAALGCLVKDYFPEPVTVSWNSGALTSGVHTFPAVLQSSGLYSLSSVVTVPSSSLGTQTYICNVNHKPSNTKVDKKVEPKSCDKTH

SEQ ID NO: 661 - protein, 215 aa, synthetic construct; identical to SEQ ID NO: 649
  REGION 1..215: note = Synthetic

SEQ ID NO: 662 - protein, 229 aa, synthetic construct
  REGION 1..229: note = Synthetic
QVQLVQSGAEVKKPGSSVKVSCKASGGTFNTYAITWVRQAPGQGLEWMGGIIPISGIAEYAQKFQGRVTITTDDSSTTAYMELNSLRSEDTAVYYCASWNYALYYFYGMDVWGRGTTVTVSSASTKGPSVFPLAPSSKSTSGGTAALGCLVKDYFPEPVTVSWNSGALTSGVHTFPAVLQSSGLYSLSSVVTVPSSSLGTQTYICNVNHKPSNTKVDKKVEPKSCDKTH

SEQ ID NO: 663 - protein, 219 aa, synthetic construct
  REGION 1..219: note = Synthetic
DIVMTQSPLSLPVTPGEPASISCRSSQSLLHSNGYNYLDWYLQKPGQSPQFLIYLGSNRASGVPDRFSGSGSGTDFTLKINRVEAEDVGVYYCMQALQTPYTFGQGTKLEIKRTVAAPSVFIFPPSDEQLKSGTASVVCLLNNFYPREAKVQWKVDNALQSGNSQESVTEQDSKDSTYSLSSTLTLSKADYEKHKVYACEVTHQGLSSPVTKSFNRGEC

SEQ ID NO: 664 - protein, 230 aa, synthetic construct
  REGION 1..230: note = Synthetic
QVQLVESGGGLVKPGGSLRLSCAASGFTFSVYYMNWIRQAPGKGLEWVSYISSSGSTIYYADSVKGRFTISRDNAKNSLYLQMNSLRAEDTAVYYCGREGYSGTYSYYGMDVWGQGTTVTVSSASTKGPSVFPLAPSSKSTSGGTAALGCLVKDYFPEPVTVSWNSGALTSGVHTFPAVLQSSGLYSLSSVVTVPSSSLGTQTYICNVNHKPSNTKVDKKVEPKSCDKTH

SEQ ID NO: 665 - protein, 214 aa, synthetic construct
  REGION 1..214: note = Synthetic
DIQMTQSPSSLSASVGDRVTITCRASQDISHYSAWYQQKPGKLPNLLIYAASTLQSGVPSRFSGSGSGTDFSLTTSSLQPEDVATYYCQKYNSVPLTFGGGTKVEIKRTVAAPSVFIFPPSDEQLKSGTASVVCLLNNFYPREAKVQWKVDNALQSGNSQESVTEQDSKDSTYSLSSTLTLSKADYEKHKVYACEVTHQGLSSPVTKSFNRGEC

SEQ ID NO: 666 - protein, 229 aa, synthetic construct
  REGION 1..229: note = Synthetic
EVQLVESGGGLVQPGRSLRLSCAVSGFTFDDYAMHWVRQAPGKGLEWVSGISWNSGTRGYADSVKGRFTISRDNAKNSLYLQMNSLRGEDTALYYCVKDITISPNYYGMDVWGQGTTVTVSSASTKGPSVFPLAPSSKSTSGGTAALGCLVKDYFPEPVTVSWNSGALTSGVHTFPAVLQSSGLYSLSSVVTVPSSSLGTQTYICNVNHKPSNTKVDKKVEPKSCDKTH

SEQ ID NO: 667 - protein, 233 aa, synthetic construct
  REGION 1..233: note = Synthetic
EVQLVESGGDLVQPGRSLRLSCAASGFTFDDYAMHWVRQAPGKGLEWVSGISWNSATRVYADSVKGRFTISRDNAKNFLYLQMNSLRSEDTALYHCAKDMDISLGYYGLDVWGQGTTVTVSSASTKGPSVFPLAPCSRSTSESTAALGCLVKDYFPEPVTVSWNSGALTSGVHTFPAVLQSSGLYSLSSVVTVPSSSLGTKTYTCNVDHKPSNTKVDKRVESKYGPPLLQGSG

SEQ ID NO: 668 - protein, 235 aa, synthetic construct
  REGION 1..235: note = Synthetic
QITLKESGPTLVKPTQTLTLTCTFSGFSLSTSGVGVVWIRQPPGKALEWLALIYWNDHKRYSPSLGSRLTITKDTSKNQVVLTMTNMDPVDTATYYCAHYSGSYSYYYYGLDVWGQGTTVTVSSASTKGPSVFPLAPCSRSTSESTAALGCLVKDYFPEPVTVSWNSGALTSGVHTFPAVLQSSGLYSLSSVVTVPSSSLGTKTYTCNVDHKPSNTKVDKRVESKYGPPLLQGSG

SEQ ID NO: 669 - protein, 232 aa, synthetic construct
  REGION 1..232: note = Synthetic
EVQLVESGGGLVQPGRSLRLSCAASGFTFDDYAMNWVRQAPGKGLEWVSGISWSSGSMDYADSVKGRFTISRDNAKNSLYLQMNSLRTEDTALYYCAKAREVGDYYGMDVWGQGTTVTVSSASTKGPSVFPLAPCSRSTSESTAALGCLVKDYFPEPVTVSWNSGALTSGVHTFPAVLQSSGLYSLSSVVTVPSSSLGTKTYTCNVDHKPSNTKVDKRVESKYGPPLLQGSG

SEQ ID NO: 670 - protein, 230 aa, synthetic construct
  REGION 1..230: note = Synthetic
EVQLVESGGGLVQPGGSLRLSCAASGFTFNIFEMNWVRQAPGKGLEWISYISSRGTTTYYADSVRGRFTISRDNAKNSLYLQMNSLRAEDTAVYYCARDYEATIPFDFWGQGTLVTVSSASTKGPSVFPLAPCSRSTSESTAALGCLVKDYFPEPVTVSWNSGALTSGVHTFPAVLQSSGLYSLSSVVTVPSSSLGTKTYTCNVDHKPSNTKVDKRVESKYGPPLLQGSG

SEQ ID NO: 671 - protein, 239 aa, synthetic construct
  REGION 1..239: note = Synthetic
EVQLVESGGGLVQPGGSLRLSCAASGFTVSNYEMNWVRQAPGKGLEWVSYISSSTSNIYYADSVKGRFTISRDNAENSLYLQMNSLRVEDTAVYYCVRDGIVVVPVGRGYYYYGLDVWGQGTTVTVSSASTKGPSVFPLAPCSRSTSESTAALGCLVKDYFPEPVTVSWNSGALTSGVHTFPAVLQSSGLYSLSSVVTVPSSSLGTKTYTCNVDHKPSNTKVDKRVESKYGPPLLQGSG

SEQ ID NO: 672 - protein, 237 aa, synthetic construct
  REGION 1..237: note = Synthetic
QVQLVESGGGVVQPGRSLRLSCAASGFPFSNYVMYWVRQAPGKGLEWVALIFFDGKKNYHADSVKGRFTITRDNSKNMLYLQMNSLRPEDAAVYYCAKIHCPNGVCYKGYYGMDVWGQGTTVTVSSASTKGPSVFPLAPCSRSTSESTAALGCLVKDYFPEPVTVSWNSGALTSGVHTFPAVLQSSGLYSLSSVVTVPSSSLGTKTYTCNVDHKPSNTKVDKRVESKYGPPLLQGSG

SEQ ID NO: 673 - protein, 29 aa, Mus musculus
MHRPRRRGTRPPPLALLAALLLAARGADA

SEQ ID NO: 674 - protein, 111 aa, synthetic construct
  REGION 1..111: note = Synthetic
ASTKGPSVFPLAPCSRSTSESTAALGCLVKDYFPEPVTVSWNSGALTSGVHTFPAVLQSSGLYSLSSVVTVPSSSLGTKTYTCNVDHKPSNTKVDKRVESKYGPPLLQGSG

SEQ ID NO: 675 - protein, 1136 aa, synthetic construct
  REGION 1..1136: note = Synthetic
DIQMTQSPSSLSASVGDRVTITCRASQGIRDHFGWYQQKPGKAPKRLIYAASSLHSGVPSRFSGSGSGTEFTLTISSLQPEDFATYYCLQYDTYPLTFGGGTKVEIKGGGGSGGGGSGGGGSEVQLVESGGGLVQPGGSLRLSCATSGFTFTSYDMKWVRQAPGLGLEWVSAISGSGGNTYYADSVKGRFTISRDNSRNTLYLQMNSLRAEDTAVYYCTRSHDFGAFDYFDYWGQGTLVTVSSGGGGSGGGGSAHPGRPRAVPTQCDVPPNSRFDCAPDKAITQEQCEARGCCYIPAKQGLQGAQMGQPWCFFPPSYPSYKLENLSSSEMGYTATLTRTTPTFFPKDILTLRLDVMMETENRLHFTIKDPANRRYEVPLETPHVHSRAPSPLYSVEFSEEPFGVIVRRQLDGRVLLNTTVAPLFFADQFLQLSTSLPSQYITGLAEHLSPLMLSTSWTRITLWNRDLAPTPGANLYGSHPFYLALEDGGSAHGVFLLNSNAMDVVLQPSPALSWRSTGGILDVYIFLGPEPKSVVQQYLDVVGYPFMPPYWGLGFHLCRWGYSSTAITRQVVENMTRAHFPLDVQWNDLDYMDSRRDFTFNKDGFRDFPAMVQELHQGGRRYMMIVDPAISSSGPAGSYRPYDEGLRRGVFITNETGQPLIGKVWPGSTAFPDFTNPTALAWWEDMVAEFHDQVPFDGMWIDMNEPSNFIRGSEDGCPNNELENPPYVPGVVGGTLQAATICASSHQFLSTHYNLHNLYGLTEAIASHRALVKARGTRPFVISRSTFAGHGRYAGHWTGDVWSSWEQLASSVPEILQFNLLGVPLVGADVCGFLGNTSEELCVRWTQLGAFYPFMRNHNSLLSLPQEPYSFSEPAQQAMRKALTLRYALLPHLYTLFHQAHVAGETVARPLFLEFPKDSSTWTVDHQLLWGEALLITPVLQAGKAEVTGYFPLGTWYDLQTVPVEALGSLPPPPAAPREPAIHSEGQWVTLPAPLDTINVHLRAGYIIPLQGPGLTTTESRQQPMALAVALTKGGEARGELFWDDGESLEVLERGAYTQVIFLARNNTIVNELVRVTSEGAGLQLQKVTVLGVATAPQQVLSNGVPVSNFTYSPDTKVLDICVSLLMGEQFLVSWC

SEQ ID NO: 676 - protein, 1138 aa, synthetic construct
  REGION 1..1138: note = Synthetic
EIVMTQSPATLSVSPGERATLSCRASQTVSSNLAWYQQKPGQAPRLLIYGSSSRATGIPARFSGSGSGTEFTLTISSLQSEDFAVYYCQQYNNWPPYTFGQGTKLEIKGGGGSGGGGSGGGGSEVQLVESGGDLVQPGRSLRLSCAASGFTFDDYAMHWVRQAPGKGLEWVSGISWNSATRVYADSVKGRFTISRDNAKNFLYLQMNSLRSEDTALYHCAKDMDISLGYYGLDVWGQGTTVTVSSGGGGSGGGGSAHPGRPRAVPTQCDVPPNSRFDCAPDKAITQEQCEARGCCYIPAKQGLQGAQMGQPWCFFPPSYPSYKLENLSSSEMGYTATLTRTTPTFFPKDILTLRLDVMMETENRLHFTIKDPANRRYEVPLETPHVHSRAPSPLYSVEFSEEPFGVIVRRQLDGRVLLNTTVAPLFFADQFLQLSTSLPSQYITGLAEHLSPLMLSTSWTRITLWNRDLAPTPGANLYGSHPFYLALEDGGSAHGVFLLNSNAMDVVLQPSPALSWRSTGGILDVYIFLGPEPKSVVQQYLDVVGYPFMPPYWGLGFHLCRWGYSSTAITRQVVENMTRAHFPLDVQWNDLDYMDSRRDFTFNKDGFRDFPAMVQELHQGGRRYMMIVDPAISSSGPAGSYRPYDEGLRRGVFITNETGQPLIGKVWPGSTAFPDFTNPTALAWWEDMVAEFHDQVPFDGMWIDMNEPSNFIRGSEDGCPNNELENPPYVPGVVGGTLQAATICASSHQFLSTHYNLHNLYGLTEAIASHRALVKARGTRPFVISRSTFAGHGRYAGHWTGDVWSSWEQLASSVPEILQFNLLGVPLVGADVCGFLGNTSEELCVRWTQLGAFYPFMRNHNSLLSLPQEPYSFSEPAQQAMRKALTLRYALLPHLYTLFHQAHVAGETVARPLFLEFPKDSSTWTVDHQLLWGEALLITPVLQAGKAEVTGYFPLGTWYDLQTVPVEALGSLPPPPAAPREPAIHSEGQWVTLPAPLDTINVHLRAGYIIPLQGPGLTTTESRQQPMALAVALTKGGEARGELFWDDGESLEVLERGAYTQVIFLARNNTIVNELVRVTSEGAGLQLQKVTVLGVATAPQQVLSNGVPVSNFTYSPDTKVLDICVSLLMGEQFLVSWC

SEQ ID NO: 677 - protein, 1136 aa, synthetic construct
  REGION 1..1136: note = Synthetic
DIQMTQSPSSLSASVGDRVTITCRASQGIRTDLGWYQQKPGKAPKRLIYAASSLQSGVPSRFSGSGSGTEFTLTISSLRPEDFATFYCLQYNSYPLTFGGGTKVEIKGGGGSGGGGSGGGGSEVQLLESGGALVQPGGSLRLSCAASGFTFTSYAMHWVRQAPGKGLEWVSSIRGSGGGTYSADSVKGRFTISRDNSRDTLYLQMNSVRAEDTAVYYCARSHDYGAFDFFDYWGQGTLVTVSSGGGGSGGGGSAHPGRPRAVPTQCDVPPNSRFDCAPDKAITQEQCEARGCCYIPAKQGLQGAQMGQPWCFFPPSYPSYKLENLSSSEMGYTATLTRTTPTFFPKDILTLRLDVMMETENRLHFTIKDPANRRYEVPLETPHVHSRAPSPLYSVEFSEEPFGVIVRRQLDGRVLLNTTVAPLFFADQFLQLSTSLPSQYITGLAEHLSPLMLSTSWTRITLWNRDLAPTPGANLYGSHPFYLALEDGGSAHGVFLLNSNAMDVVLQPSPALSWRSTGGILDVYIFLGPEPKSVVQQYLDVVGYPFMPPYWGLGFHLCRWGYSSTAITRQVVENMTRAHFPLDVQWNDLDYMDSRRDFTFNKDGFRDFPAMVQELHQGGRRYMMIVDPAISSSGPAGSYRPYDEGLRRGVFITNETGQPLIGKVWPGSTAFPDFTNPTALAWWEDMVAEFHDQVPFDGMWIDMNEPSNFIRGSEDGCPNNELENPPYVPGVVGGTLQAATICASSHQFLSTHYNLHNLYGLTEAIASHRALVKARGTRPFVISRSTFAGHGRYAGHWTGDVWSSWEQLASSVPEILQFNLLGVPLVGADVCGFLGNTSEELCVRWTQLGAFYPFMRNHNSLLSLPQEPYSFSEPAQQAMRKALTLRYALLPHLYTLFHQAHVAGETVARPLFLEFPKDSSTWTVDHQLLWGEALLITPVLQAGKAEVTGYFPLGTWYDLQTVPVEALGSLPPPPAAPREPAIHSEGQWVTLPAPLDTINVHLRAGYIIPLQGPGLTTTESRQQPMALAVALTKGGEARGELFWDDGESLEVLERGAYTQVIFLARNNTIVNELVRVTSEGAGLQLQKVTVLGVATAPQQVLSNGVPVSNFTYSPDTKVLDICVSLLMGEQFLVSWC

SEQ ID NO: 678 - protein, 1131 aa, synthetic construct
  REGION 1..1131: note = Synthetic
EIVMTQSPATLSVSPGERATLSCRASQSVSINLAWYQQKPGQAPRLLIFVASTRATGIPARFSGSGSGTEFTLTISSLQSEDFATYYCQQYDIWPYTFGQGTKLEIKGGGGSGGGGSGGGGSQVQLVESGGGLVKPGGSLRLSCAASGFTFSDYFMSWIRQAPGKGLEWVSYISSTGSTINYADSVKGRFTISRDNVKNSLYLQMTSLRVEDTAVYYCTRDNWNYEYWGQGTLVTVSSGGGGSGGGGSAHPGRPRAVPTQCDVPPNSRFDCAPDKAITQEQCEARGCCYIPAKQGLQGAQMGQPWCFFPPSYPSYKLENLSSSEMGYTATLTRTTPTFFPKDILTLRLDVMMETENRLHFTIKDPANRRYEVPLETPHVHSRAPSPLYSVEFSEEPFGVIVRRQLDGRVLLNTTVAPLFFADQFLQLSTSLPSQYITGLAEHLSPLMLSTSWTRITLWNRDLAPTPGANLYGSHPFYLALEDGGSAHGVFLLNSNAMDVVLQPSPALSWRSTGGILDVYIFLGPEPKSVVQQYLDVVGYPFMPPYWGLGFHLCRWGYSSTAITRQVVENMTRAHFPLDVQWNDLDYMDSRRDFTFNKDGFRDFPAMVQELHQGGRRYMMIVDPAISSSGPAGSYRPYDEGLRRGVFITNETGQPLIGKVWPGSTAFPDFTNPTALAWWEDMVAEFHDQVPFDGMWIDMNEPSNFIRGSEDGCPNNELENPPYVPGVVGGTLQAATICASSHQFLSTHYNLHNLYGLTEAIASHRALVKARGTRPFVISRSTFAGHGRYAGHWTGDVWSSWEQLASSVPEILQFNLLGVPLVGADVCGFLGNTSEELCVRWTQLGAFYPFMRNHNSLLSLPQEPYSFSEPAQQAMRKALTLRYALLPHLYTLFHQAHVAGETVARPLFLEFPKDSSTWTVDHQLLWGEALLITPVLQAGKAEVTGYFPLGTWYDLQTVPVEALGSLPPPPAAPREPAIHSEGQWVTLPAPLDTINVHLRAGYIIPLQGPGLTTTESRQQPMALAVALTKGGEARGELFWDDGESLEVLERGAYTQVIFLARNNTIVNELVRVTSEGAGLQLQKVTVLGVATAPQQVLSNGVPVSNFTYSPDTKVLDICVSLLMGEQFLVSWC

SEQ ID NO: 679 - protein, 1138 aa, synthetic construct
  REGION 1..1138: note = Synthetic
DIQMTQSPSSLSASVGDRVTINCRASQGIRNDLGWYQQKPGKAPKRLIYAASSLQSGVPLRFSGSGSGTEFTLTINNLQPEDFATYYCLSHNSYPWTFGQGTKVEIKGGGGSGGGGSGGGGSQLQLQESGPGLVKPSETLSLTCTVSGESISSNTYYWGWIRQPPGKGLEWIGSIDYSGTTNYNPSLKSRVTISVDTSRNHFSLRLRSVTAADTAVYYCAREWGNYGYYYGMDVWGQGTTVTVSSGGGGSGGGGSAHPGRPRAVPTQCDVPPNSRFDCAPDKAITQEQCEARGCCYIPAKQGLQGAQMGQPWCFFPPSYPSYKLENLSSSEMGYTATLTRTTPTFFPKDILTLRLDVMMETENRLHFTIKDPANRRYEVPLETPHVHSRAPSPLYSVEFSEEPFGVIVRRQLDGRVLLNTTVAPLFFADQFLQLSTSLPSQYITGLAEHLSPLMLSTSWTRITLWNRDLAPTPGANLYGSHPFYLALEDGGSAHGVFLLNSNAMDVVLQPSPALSWRSTGGILDVYIFLGPEPKSVVQQYLDVVGYPFMPPYWGLGFHLCRWGYSSTAITRQVVENMTRAHFPLDVQWNDLDYMDSRRDFTFNKDGFRDFPAMVQELHQGGRRYMMIVDPAISSSGPAGSYRPYDEGLRRGVFITNETGQPLIGKVWPGSTAFPDFTNPTALAWWEDMVAEFHDQVPFDGMWIDMNEPSNFIRGSEDGCPNNELENPPYVPGVVGGTLQAATICASSHQFLSTHYNLHNLYGLTEAIASHRALVKARGTRPFVISRSTFAGHGRYAGHWTGDVWSSWEQLASSVPEILQFNLLGVPLVGADVCGFLGNTSEELCVRWTQLGAFYPFMRNHNSLLSLPQEPYSFSEPAQQAMRKALTLRYALLPHLYTLFHQAHVAGETVARPLFLEFPKDSSTWTVDHQLLWGEALLITPVLQAGKAEVTGYFPLGTWYDLQTVPVEALGSLPPPPAAPREPAIHSEGQWVTLPAPLDTINVHLRAGYIIPLQGPGLTTTESRQQPMALAVALTKGGEARGELFWDDGESLEVLERGAYTQVIFLARNNTIVNELVRVTSEGAGLQLQKVTVLGVATAPQQVLSNGVPVSNFTYSPDTKVLDICVSLLMGEQFLVSWC

SEQ ID NO: 680 - protein, 1133 aa, synthetic construct
  REGION 1..1133: note = Synthetic
DIQMTQSPPSVSASVGDRVTITCRASQGISSWLAWYQQKPGKAPKLLIYAASSLQSGVPSRFSGSGSGTDFTLTISSLQPEDFATYYCQQANSFPRTFGQGTKVEIKGGGGSGGGGSGGGGSQVQLVQSGAEVKKPGSSVRVSCKASRGTFSSYAISWVRQAPGQGLEWMGGIIPIFGTANYAQKFLARVTITADESTSTAYMELSSLRSEDTAVYYCAREKGWNYFDYWGQGTLVTVSSGGGGSGGGGSAHPGRPRAVPTQCDVPPNSRFDCAPDKAITQEQCEARGCCYIPAKQGLQGAQMGQPWCFFPPSYPSYKLENLSSSEMGYTATLTRTTPTFFPKDILTLRLDVMMETENRLHFTIKDPANRRYEVPLETPHVHSRAPSPLYSVEFSEEPFGVIVRRQLDGRVLLNTTVAPLFFADQFLQLSTSLPSQYITGLAEHLSPLMLSTSWTRITLWNRDLAPTPGANLYGSHPFYLALEDGGSAHGVFLLNSNAMDVVLQPSPALSWRSTGGILDVYIFLGPEPKSVVQQYLDVVGYPFMPPYWGLGFHLCRWGYSSTAITRQVVENMTRAHFPLDVQWNDLDYMDSRRDFTFNKDGFRDFPAMVQELHQGGRRYMMIVDPAISSSGPAGSYRPYDEGLRRGVFITNETGQPLIGKVWPGSTAFPDFTNPTALAWWEDMVAEFHDQVPFDGMWIDMNEPSNFIRGSEDGCPNNELENPPYVPGVVGGTLQAATICASSHQFLSTHYNLHNLYGLTEAIASHRALVKARGTRPFVISRSTFAGHGRYAGHWTGDVWSSWEQLASSVPEILQFNLLGVPLVGADVCGFLGNTSEELCVRWTQLGAFYPFMRNHNSLLSLPQEPYSFSEPAQQAMRKALTLRYALLPHLYTLFHQAHVAGETVARPLFLEFPKDSSTWTVDHQLLWGEALLITPVLQAGKAEVTGYFPLGTWYDLQTVPVEALGSLPPPPAAPREPAIHSEGQWVTLPAPLDTINVHLRAGYIIPLQGPGLTTTESRQQPMALAVALTKGGEARGELFWDDGESLEVLERGAYTQVIFLARNNTIVNELVRVTSEGAGLQLQKVTVLGVATAPQQVLSNGVPVSNFTYSPDTKVLDICVSLLMGEQFLVSWC

SEQ ID NO: 681 - protein, 1143 aa, synthetic construct
  REGION 1..1143: note = Synthetic
DIVMTQSPLSLPVTPGEPASISCRSSQSLLHGNGYNYLTWYLQKPGQSPQLLIYLGSNRASGVPDRFSGSGSGTDFTLKISRVEAEDVGVYYCMQALQTPYTFGQGTKLEIKGGGGSGGGGSGGGGSQVQLVESGGGLVKPGGSLRLSCAASGFTFSDYYMNWIRQAPGKGLEWVSYISSSGTTIYYADSVKGRFTISRDNAKKSLYLEMNSLRAEDTAVYYCAREGYGNDYYYYGIDVWGQGTTVTVSSGGGGSGGGGSAHPGRPRAVPTQCDVPPNSRFDCAPDKAITQEQCEARGCCYIPAKQGLQGAQMGQPWCFFPPSYPSYKLENLSSSEMGYTATLTRTTPTFFPKDILTLRLDVMMETENRLHFTIKDPANRRYEVPLETPHVHSRAPSPLYSVEFSEEPFGVIVRRQLDGRVLLNTTVAPLFFADQFLQLSTSLPSQYITGLAEHLSPLMLSTSWTRITLWNRDLAPTPGANLYGSHPFYLALEDGGSAHGVFLLNSNAMDVVLQPSPALSWRSTGGILDVYIFLGPEPKSVVQQYLDVVGYPFMPPYWGLGFHLCRWGYSSTAITRQVVENMTRAHFPLDVQWNDLDYMDSRRDFTFNKDGFRDFPAMVQELHQGGRRYMMIVDPAISSSGPAGSYRPYDEGLRRGVFITNETGQPLIGKVWPGSTAFPDFTNPTALAWWEDMVAEFHDQVPFDGMWIDMNEPSNFIRGSEDGCPNNELENPPYVPGVVGGTLQAATICASSHQFLSTHYNLHNLYGLTEAIASHRALVKARGTRPFVISRSTFAGHGRYAGHWTGDVWSSWEQLASSVPEILQFNLLGVPLVGADVCGFLGNTSEELCVRWTQLGAFYPFMRNHNSLLSLPQEPYSFSEPAQQAMRKALTLRYALLPHLYTLFHQAHVAGETVARPLFLEFPKDSSTWTVDHQLLWGEALLITPVLQAGKAEVTGYFPLGTWYDLQTVPVEALGSLPPPPAAPREPAIHSEGQWVTLPAPLDTINVHLRAGYIIPLQGPGLTTTESRQQPMALAVALTKGGEARGELFWDDGESLEVLERGAYTQVIFLARNNTIVNELVRVTSEGAGLQLQKVTVLGVATAPQQVLSNGVPVSNFTYSPDTKVLDICVSLLMGEQFLVSWC

SEQ ID NO: 682 - protein, 1138 aa, synthetic construct
  REGION 1..1138: note = Synthetic
DIQMTQSPSSLSASVGDRVTITCRASQSISSYLNWYQQKPGKAPKLLIYAASSLQSGVPSRFSGSGSGTDFTLTISSLQPEDFATYYCQQSYSTPPITFGQGTRLEIKGGGGSGGGGSGGGGSQVQLVESGGGVVQPGRSLRLSCAASGFTFSSFGMHWVRQAPGKGLEWVIFISYDGSDKYYADSVKGRFAISRDSSKNTLYLQMNSLRAEDTAVYYCAKENGILTDSYGMDVWGQGTTVTVSSGGGGSGGGGSAHPGRPRAVPTQCDVPPNSRFDCAPDKAITQEQCEARGCCYIPAKQGLQGAQMGQPWCFFPPSYPSYKLENLSSSEMGYTATLTRTTPTFFPKDILTLRLDVMMETENRLHFTIKDPANRRYEVPLETPHVHSRAPSPLYSVEFSEEPFGVIVRRQLDGRVLLNTTVAPLFFADQFLQLSTSLPSQYITGLAEHLSPLMLSTSWTRITLWNRDLAPTPGANLYGSHPFYLALEDGGSAHGVFLLNSNAMDVVLQPSPALSWRSTGGILDVYIFLGPEPKSVVQQYLDVVGYPFMPPYWGLGFHLCRWGYSSTAITRQVVENMTRAHFPLDVQWNDLDYMDSRRDFTFNKDGFRDFPAMVQELHQGGRRYMMIVDPAISSSGPAGSYRPYDEGLRRGVFITNETGQPLIGKVWPGSTAFPDFTNPTALAWWEDMVAEFHDQVPFDGMWIDMNEPSNFIRGSEDGCPNNELENPPYVPGVVGGTLQAATICASSHQFLSTHYNLHNLYGLTEAIASHRALVKARGTRPFVISRSTFAGHGRYAGHWTGDVWSSWEQLASSVPEILQFNLLGVPLVGADVCGFLGNTSEELCVRWTQLGAFYPFMRNHNSLLSLPQEPYSFSEPAQQAMRKALTLRYALLPHLYTLFHQAHVAGETVARPLFLEFPKDSSTWTVDHQLLWGEALLITPVLQAGKAEVTGYFPLGTWYDLQTVPVEALGSLPPPPAAPREPAIHSEGQWVTLPAPLDTINVHLRAGYIIPLQGPGLTTTESRQQPMALAVALTKGGEARGELFWDDGESLEVLERGAYTQVIFLARNNTIVNELVRVTSEGAGLQLQKVTVLGVATAPQQVLSNGVPVSNFTYSPDTKVLDICVSLLMGEQFLVSWC

SEQ ID NO: 683 - protein, 1140 aa, synthetic construct
  REGION 1..1140: note = Synthetic
DIQMTQSPSSLSASVGDRVTITCRASQSISSYLNWYQQKPGKAPKLLIYAASSLQSGVPSRFSGSGSGTDFTLTISSLQPEDFATYYCQQSYSTPPITFGQGTRLEIKGGGGSGGGGSGGGGSQVQLVQSGAEVKKPGASVKVSCKASGYTFTSYGISWVRQAPGQGLEWMGWISVYHGNTNYAQKFQGRVTMTTDTSTSTAYMELRSLRSDDTAVYYCAREGYYDFWSGYYPFDYWGQGTLVTVSSGGGGSGGGGSAHPGRPRAVPTQCDVPPNSRFDCAPDKAITQEQCEARGCCYIPAKQGLQGAQMGQPWCFFPPSYPSYKLENLSSSEMGYTATLTRTTPTFFPKDILTLRLDVMMETENRLHFTIKDPANRRYEVPLETPHVHSRAPSPLYSVEFSEEPFGVIVRRQLDGRVLLNTTVAPLFFADQFLQLSTSLPSQYITGLAEHLSPLMLSTSWTRITLWNRDLAPTPGANLYGSHPFYLALEDGGSAHGVFLLNSNAMDVVLQPSPALSWRSTGGILDVYIFLGPEPKSVVQQYLDVVGYPFMPPYWGLGFHLCRWGYSSTAITRQVVENMTRAHFPLDVQWNDLDYMDSRRDFTFNKDGFRDFPAMVQELHQGGRRYMMIVDPAISSSGPAGSYRPYDEGLRRGVFITNETGQPLIGKVWPGSTAFPDFTNPTALAWWEDMVAEFHDQVPFDGMWIDMNEPSNFIRGSEDGCPNNELENPPYVPGVVGGTLQAATICASSHQFLSTHYNLHNLYGLTEAIASHRALVKARGTRPFVISRSTFAGHGRYAGHWTGDVWSSWEQLASSVPEILQFNLLGVPLVGADVCGFLGNTSEELCVRWTQLGAFYPFMRNHNSLLSLPQEPYSFSEPAQQAMRKALTLRYALLPHLYTLFHQAHVAGETVARPLFLEFPKDSSTWTVDHQLLWGEALLITPVLQAGKAEVTGYFPLGTWYDLQTVPVEALGSLPPPPAAPREPAIHSEGQWVTLPAPLDTINVHLRAGYIIPLQGPGLTTTESRQQPMALAVALTKGGEARGELFWDDGESLEVLERGAYTQVIFLARNNTIVNELVRVTSEGAGLQLQKVTVLGVATAPQQVLSNGVPVSNFTYSPDTKVLDICVSLLMGEQFLVSWC

SEQ ID NO: 684 - protein, 1134 aa, synthetic construct
  REGION 1..1134: note = Synthetic
DIQMTQSPSSLSASVGDRVTITCRASQSISSYLNWYQQKPGKAPKLLIYAASSLQSGVPSRFSGSGSGTDFTLTISSLQPEDFATYYCQQSYSTPPITFGQGTRLEIKGGGGSGGGGSGGGGSEVQLVESGGGLIQPGGSLRLSCEASGFTFRNYEMNWVRQAPGKGLEWVSYISSSGNMKDYAESVKGRFTISRDNVKNSLQLQMNSLRVEDTAVYYCARDEFPYGMDVWGQGTTVTVSSGGGGSGGGGSAHPGRPRAVPTQCDVPPNSRFDCAPDKAITQEQCEARGCCYIPAKQGLQGAQMGQPWCFFPPSYPSYKLENLSSSEMGYTATLTRTTPTFFPKDILTLRLDVMMETENRLHFTIKDPANRRYEVPLETPHVHSRAPSPLYSVEFSEEPFGVIVRRQLDGRVLLNTTVAPLFFADQFLQLSTSLPSQYITGLAEHLSPLMLSTSWTRITLWNRDLAPTPGANLYGSHPFYLALEDGGSAHGVFLLNSNAMDVVLQPSPALSWRSTGGILDVYIFLGPEPKSVVQQYLDVVGYPFMPPYWGLGFHLCRWGYSSTAITRQVVENMTRAHFPLDVQWNDLDYMDSRRDFTFNKDGFRDFPAMVQELHQGGRRYMMIVDPAISSSGPAGSYRPYDEGLRRGVFITNETGQPLIGKVWPGSTAFPDFTNPTALAWWEDMVAEFHDQVPFDGMWIDMNEPSNFIRGSEDGCPNNELENPPYVPGVVGGTLQAATICASSHQFLSTHYNLHNLYGLTEAIASHRALVKARGTRPFVISRSTFAGHGRYAGHWTGDVWSSWEQLASSVPEILQFNLLGVPLVGADVCGFLGNTSEELCVRWTQLGAFYPFMRNHNSLLSLPQEPYSFSEPAQQAMRKALTLRYALLPHLYTLFHQAHVAGETVARPLFLEFPKDSSTWTVDHQLLWGEALLITPVLQAGKAEVTGYFPLGTWYDLQTVPVEALGSLPPPPAAPREPAIHSEGQWVTLPAPLDTINVHLRAGYIIPLQGPGLTTTESRQQPMALAVALTKGGEARGELFWDDGESLEVLERGAYTQVIFLARNNTIVNELVRVTSEGAGLQLQKVTVLGVATAPQQVLSNGVPVSNFTYSPDTKVLDICVSLLMGEQFLVSWC

SEQ ID NO: 685 - protein, 1141 aa, synthetic construct
  REGION 1..1141: note = Synthetic
DIQMTQSPSSLSASVGDRVTITCRASQSISSYLNWYQQKPGKAPKLLIYAASSLQSGVPSRFSGSGSGTDFTLTISSLQPEDFATYYCQQSYSTPPITFGQGTRLEIKGGGGSGGGGSGGGGSEVQLVESGGGLVQPGGSLRLSCAASGFTFSNYWMNWVRQAPGKGLEWVANIKEDGGKKLYVDSVKGRFTISRDNAKNSLFLQMNSLRAEDTAVYYCAREDTTLVVDYYYYGMDVWGQGTTVTVSSGGGGSGGGGSAHPGRPRAVPTQCDVPPNSRFDCAPDKAITQEQCEARGCCYIPAKQGLQGAQMGQPWCFFPPSYPSYKLENLSSSEMGYTATLTRTTPTFFPKDILTLRLDVMMETENRLHFTIKDPANRRYEVPLETPHVHSRAPSPLYSVEFSEEPFGVIVRRQLDGRVLLNTTVAPLFFADQFLQLSTSLPSQYITGLAEHLSPLMLSTSWTRITLWNRDLAPTPGANLYGSHPFYLALEDGGSAHGVFLLNSNAMDVVLQPSPALSWRSTGGILDVYIFLGPEPKSVVQQYLDVVGYPFMPPYWGLGFHLCRWGYSSTAITRQVVENMTRAHFPLDVQWNDLDYMDSRRDFTFNKDGFRDFPAMVQELHQGGRRYMMIVDPAISSSGPAGSYRPYDEGLRRGVFITNETGQPLIGKVWPGSTAFPDFTNPTALAWWEDMVAEFHDQVPFDGMWIDMNEPSNFIRGSEDGCPNNELENPPYVPGVVGGTLQAATICASSHQFLSTHYNLHNLYGLTEAIASHRALVKARGTRPFVISRSTFAGHGRYAGHWTGDVWSSWEQLASSVPEILQFNLLGVPLVGADVCGFLGNTSEELCVRWTQLGAFYPFMRNHNSLLSLPQEPYSFSEPAQQAMRKALTLRYALLPHLYTLFHQAHVAGETVARPLFLEFPKDSSTWTVDHQLLWGEALLITPVLQAGKAEVTGYFPLGTWYDLQTVPVEALGSLPPPPAAPREPAIHSEGQWVTLPAPLDTINVHLRAGYIIPLQGPGLTTTESRQQPMALAVALTKGGEARGELFWDDGESLEVLERGAYTQVIFLARNNTIVNELVRVTSEGAGLQLQKVTVLGVATAPQQVLSNGVPVSNFTYSPDTKVLDICVSLLMGEQFLVSWC

SEQ ID NO: 686 - protein, 1137 aa, synthetic construct
  REGION 1..1137: note = Synthetic
DIQMTQSPSSLSASVGDRVTITCRASQSISSYLNWYQQKPGKAPKLLIYAASSLQSGVPSRFSGSGSGTDFTLTISSLQPEDFATYYCQQSYSTPPITFGQGTRLEIKGGGGSGGGGSGGGGSEVQLVESGGSVVRPGGSLRLSCEASGFTFDDYGMSWVRQDPGKGLEWVSGINWNGDRTNYADSVKGRFIISRDNAKNSVYLQMNSLRAEDSALYHCARDQGLGVAATLDYWGQGTLVTVSSGGGGSGGGGSAHPGRPRAVPTQCDVPPNSRFDCAPDKAITQEQCEARGCCYIPAKQGLQGAQMGQPWCFFPPSYPSYKLENLSSSEMGYTATLTRTTPTFFPKDILTLRLDVMMETENRLHFTIKDPANRRYEVPLETPHVHSRAPSPLYSVEFSEEPFGVIVRRQLDGRVLLNTTVAPLFFADQFLQLSTSLPSQYITGLAEHLSPLMLSTSWTRITLWNRDLAPTPGANLYGSHPFYLALEDGGSAHGVFLLNSNAMDVVLQPSPALSWRSTGGILDVYIFLGPEPKSVVQQYLDVVGYPFMPPYWGLGFHLCRWGYSSTAITRQVVENMTRAHFPLDVQWNDLDYMDSRRDFTFNKDGFRDFPAMVQELHQGGRRYMMIVDPAISSSGPAGSYRPYDEGLRRGVFITNETGQPLIGKVWPGSTAFPDFTNPTALAWWEDMVAEFHDQVPFDGMWIDMNEPSNFIRGSEDGCPNNELENPPYVPGVVGGTLQAATICASSHQFLSTHYNLHNLYGLTEAIASHRALVKARGTRPFVISRSTFAGHGRYAGHWTGDVWSSWEQLASSVPEILQFNLLGVPLVGADVCGFLGNTSEELCVRWTQLGAFYPFMRNHNSLLSLPQEPYSFSEPAQQAMRKALTLRYALLPHLYTLFHQAHVAGETVARPLFLEFPKDSSTWTVDHQLLWGEALLITPVLQAGKAEVTGYFPLGTWYDLQTVPVEALGSLPPPPAAPREPAIHSEGQWVTLPAPLDTINVHLRAGYIIPLQGPGLTTTESRQQPMALAVALTKGGEARGELFWDDGESLEVLERGAYTQVIFLARNNTIVNELVRVTSEGAGLQLQKVTVLGVATAPQQVLSNGVPVSNFTYSPDTKVLDICVSLLMGEQFLVSWC

SEQ ID NO: 687 - protein, 1144 aa, synthetic construct
  REGION 1..1144: note = Synthetic
DIQMTQSPSSLSASVGDRVTITCRASQSISSYLNWYQQKPGKAPKLLIYAASSLQSGVPSRFSGSGSGTDFTLTISSLQPEDFATYYCQQSYSTPPITFGQGTRLEIKGGGGSGGGGSGGGGSEVQLVESGGGLVQPGGSLRLSCAASGFTVSNYEMNWVRQAPGKGLEWVSYISSSTSNIYYADSVKGRFTISRDNAENSLYLQMNSLRVEDTAVYYCVRDGIVVVPVGRGYYYYGLDVWGQGTTVTVSSGGGGSGGGGSAHPGRPRAVPTQCDVPPNSRFDCAPDKAITQEQCEARGCCYIPAKQGLQGAQMGQPWCFFPPSYPSYKLENLSSSEMGYTATLTRTTPTFFPKDILTLRLDVMMETENRLHFTIKDPANRRYEVPLETPHVHSRAPSPLYSVEFSEEPFGVIVRRQLDGRVLLNTTVAPLFFADQFLQLSTSLPSQYITGLAEHLSPLMLSTSWTRITLWNRDLAPTPGANLYGSHPFYLALEDGGSAHGVFLLNSNAMDVVLQPSPALSWRSTGGILDVYIFLGPEPKSVVQQYLDVVGYPFMPPYWGLGFHLCRWGYSSTAITRQVVENMTRAHFPLDVQWNDLDYMDSRRDFTFNKDGFRDFPAMVQELHQGGRRYMMIVDPAISSSGPAGSYRPYDEGLRRGVFITNETGQPLIGKVWPGSTAFPDFTNPTALAWWEDMVAEFHDQVPFDGMWIDMNEPSNFIRGSEDGCPNNELENPPYVPGVVGGTLQAATICASSHQFLSTHYNLHNLYGLTEAIASHRALVKARGTRPFVISRSTFAGHGRYAGHWTGDVWSSWEQLASSVPEILQFNLLGVPLVGADVCGFLGNTSEELCVRWTQLGAFYPFMRNHNSLLSLPQEPYSFSEPAQQAMRKALTLRYALLPHLYTLFHQAHVAGETVARPLFLEFPKDSSTWTVDHQLLWGEALLITPVLQAGKAEVTGYFPLGTWYDLQTVPVEALGSLPPPPAAPREPAIHSEGQWVTLPAPLDTINVHLRAGYIIPLQGPGLTTTESRQQPMALAVALTKGGEARGELFWDDGESLEVLERGAYTQVIFLARNNTIVNELVRVTSEGAGLQLQKVTVLGVATAPQQVLSNGVPVSNFTYSPDTKVLDICVSLLMGEQFLVSWC

SEQ ID NO: 688 - protein, 1135 aa, synthetic construct
  REGION 1..1135: note = Synthetic
EIVLTQSPGTLSLSPGERATLSCRASQSVSSSYLAWYQQKPGQAPRLLIYGASSRATGIPDRFSGSGSGTDFTLTISRLEPEDFAVYYCQQYGSSPWTFGQGTKVEIKGGGGSGGGGSGGGGSEVQLVESGGGLVQPGRSLTLSCAASGFTFDNFGMHWVRQGPGKGLEWVSGLTWNSGVIGYADSVKGRFTISRDNAKNSLYLQMNSLRPEDTALYYCAKDIRNYGPFDYWGQGTLVTVSSGGGGSGGGGSAHPGRPRAVPTQCDVPPNSRFDCAPDKAITQEQCEARGCCYIPAKQGLQGAQMGQPWCFFPPSYPSYKLENLSSSEMGYTATLTRTTPTFFPKDILTLRLDVMMETENRLHFTIKDPANRRYEVPLETPHVHSRAPSPLYSVEFSEEPFGVIVRRQLDGRVLLNTTVAPLFFADQFLQLSTSLPSQYITGLAEHLSPLMLSTSWTRITLWNRDLAPTPGANLYGSHPFYLALEDGGSAHGVFLLNSNAMDVVLQPSPALSWRSTGGILDVYIFLGPEPKSVVQQYLDVVGYPFMPPYWGLGFHLCRWGYSSTAITRQVVENMTRAHFPLDVQWNDLDYMDSRRDFTFNKDGFRDFPAMVQELHQGGRRYMMIVDPAISSSGPAGSYRPYDEGLRRGVFITNETGQPLIGKVWPGSTAFPDFTNPTALAWWEDMVAEFHDQVPFDGMWIDMNEPSNFIRGSEDGCPNNELENPPYVPGVVGGTLQAATICASSHQFLSTHYNLHNLYGLTEAIASHRALVKARGTRPFVISRSTFAGHGRYAGHWTGDVWSSWEQLASSVPEILQFNLLGVPLVGADVCGFLGNTSEELCVRWTQLGAFYPFMRNHNSLLSLPQEPYSFSEPAQQAMRKALTLRYALLPHLYTLFHQAHVAGETVARPLFLEFPKDSSTWTVDHQLLWGEALLITPVLQAGKAEVTGYFPLGTWYDLQTVPVEALGSLPPPPAAPREPAIHSEGQWVTLPAPLDTINVHLRAGYIIPLQGPGLTTTESRQQPMALAVALTKGGEARGELFWDDGESLEVLERGAYTQVIFLARNNTIVNELVRVTSEGAGLQLQKVTVLGVATAPQQVLSNGVPVSNFTYSPDTKVLDICVSLLMGEQFLVSWC

SEQ ID NO: 689 - protein, 1138 aa, synthetic construct
  REGION 1..1138: note = Synthetic
EIVLTQSPGTLSLSPGERATLSCRASQSVSSSYLAWYQQKPGQAPRLLIYGASSRATGIPDRFSGSGSGTDFTLTISRLEPEDFAVYYCQQYGSSPWTFGQGTKVEIKGGGGSGGGGSGGGGSQVQLVQSGAEVKKPGSSVKVSCKASGGTFNTYAITWVRQAPGQGLEWMGGIIPISGIAEYAQKFQGRVTITTDDSSTTAYMELNSLRSEDTAVYYCASWNYALYYFYGMDVWGRGTTVTVSSGGGGSGGGGSAHPGRPRAVPTQCDVPPNSRFDCAPDKAITQEQCEARGCCYIPAKQGLQGAQMGQPWCFFPPSYPSYKLENLSSSEMGYTATLTRTTPTFFPKDILTLRLDVMMETENRLHFTIKDPANRRYEVPLETPHVHSRAPSPLYSVEFSEEPFGVIVRRQLDGRVLLNTTVAPLFFADQFLQLSTSLPSQYITGLAEHLSPLMLSTSWTRITLWNRDLAPTPGANLYGSHPFYLALEDGGSAHGVFLLNSNAMDVVLQPSPALSWRSTGGILDVYIFLGPEPKSVVQQYLDVVGYPFMPPYWGLGFHLCRWGYSSTAITRQVVENMTRAHFPLDVQWNDLDYMDSRRDFTFNKDGFRDFPAMVQELHQGGRRYMMIVDPAISSSGPAGSYRPYDEGLRRGVFITNETGQPLIGKVWPGSTAFPDFTNPTALAWWEDMVAEFHDQVPFDGMWIDMNEPSNFIRGSEDGCPNNELENPPYVPGVVGGTLQAATICASSHQFLSTHYNLHNLYGLTEAIASHRALVKARGTRPFVISRSTFAGHGRYAGHWTGDVWSSWEQLASSVPEILQFNLLGVPLVGADVCGFLGNTSEELCVRWTQLGAFYPFMRNHNSLLSLPQEPYSFSEPAQQAMRKALTLRYALLPHLYTLFHQAHVAGETVARPLFLEFPKDSSTWTVDHQLLWGEALLITPVLQAGKAEVTGYFPLGTWYDLQTVPVEALGSLPPPPAAPREPAIHSEGQWVTLPAPLDTINVHLRAGYIIPLQGPGLTTTESRQQPMALAVALTKGGEARGELFWDDGESLEVLERGAYTQVIFLARNNTIVNELVRVTSEGAGLQLQKVTVLGVATAPQQVLSNGVPVSNFTYSPDTKVLDICVSLLMGEQFLVSWC

SEQ ID NO: 690 - protein, 1136 aa, synthetic construct
  REGION 1..1136: note = Synthetic
DIQMTQSPSSLSASIGDRVTITCRASQGISNYLAWYQQKPGKVPKLLIYAASTLQSGVPSRFSGSGSGTDFTLTISSLQPEDVATYYCQNHNSVPLTFGGGTKVEIKGGGGSGGGGSGGGGSEVQLVESGGGLVQPGGSLRLSCAASGFTFNSYAMTWVRQAPGKGLEWVSFIGGSTGNTYYAGSVKGRFTISSDNSKKTLYLQMNSLRAEDTAVYYCAKGGAARRMEYFQHWGQGTLVTVSSGGGGSGGGGSAHPGRPRAVPTQCDVPPNSRFDCAPDKAITQEQCEARGCCYIPAKQGLQGAQMGQPWCFFPPSYPSYKLENLSSSEMGYTATLTRTTPTFFPKDILTLRLDVMMETENRLHFTIKDPANRRYEVPLETPHVHSRAPSPLYSVEFSEEPFGVIVRRQLDGRVLLNTTVAPLFFADQFLQLSTSLPSQYITGLAEHLSPLMLSTSWTRITLWNRDLAPTPGANLYGSHPFYLALEDGGSAHGVFLLNSNAMDVVLQPSPALSWRSTGGILDVYIFLGPEPKSVVQQYLDVVGYPFMPPYWGLGFHLCRWGYSSTAITRQVVENMTRAHFPLDVQWNDLDYMDSRRDFTFNKDGFRDFPAMVQELHQGGRRYMMIVDPAISSSGPAGSYRPYDEGLRRGVFITNETGQPLIGKVWPGSTAFPDFTNPTALAWWEDMVAEFHDQVPFDGMWIDMNEPSNFIRGSEDGCPNNELENPPYVPGVVGGTLQAATICASSHQFLSTHYNLHNLYGLTEAIASHRALVKARGTRPFVISRSTFAGHGRYAGHWTGDVWSSWEQLASSVPEILQFNLLGVPLVGADVCGFLGNTSEELCVRWTQLGAFYPFMRNHNSLLSLPQEPYSFSEPAQQAMRKALTLRYALLPHLYTLFHQAHVAGETVARPLFLEFPKDSSTWTVDHQLLWGEALLITPVLQAGKAEVTGYFPLGTWYDLQTVPVEALGSLPPPPAAPREPAIHSEGQWVTLPAPLDTINVHLRAGYIIPLQGPGLTTTESRQQPMALAVALTKGGEARGELFWDDGESLEVLERGAYTQVIFLARNNTIVNELVRVTSEGAGLQLQKVTVLGVATAPQQVLSNGVPVSNFTYSPDTKVLDICVSLLMGEQFLVSWC

SEQ ID NO: 691 - protein, 1136 aa, synthetic construct
  REGION 1..1136: note = Synthetic
DIQMTQSPSSLSASVGDRVTITCRASQGISNYLAWYQQKPGKVPNLLIYAASTLQSGVPSRFSGSGSGTDFTLTISSLQPEDVATYYCQKYNSAPLTFGGGTKVEIKGGGGSGGGGSGGGGSEVQLVESGGGLVQPGGSLRLSCAASGFAFSSYAMTWVRQAPGKGLEWVSVISGTGGSTYYADSVKGRFTISRDNSKNTLYLQMNSLRAEDTAVYYCAKGGAARRMEYFQYWGQGTLVTVSSGGGGSGGGGSAHPGRPRAVPTQCDVPPNSRFDCAPDKAITQEQCEARGCCYIPAKQGLQGAQMGQPWCFFPPSYPSYKLENLSSSEMGYTATLTRTTPTFFPKDILTLRLDVMMETENRLHFTIKDPANRRYEVPLETPHVHSRAPSPLYSVEFSEEPFGVIVRRQLDGRVLLNTTVAPLFFADQFLQLSTSLPSQYITGLAEHLSPLMLSTSWTRITLWNRDLAPTPGANLYGSHPFYLALEDGGSAHGVFLLNSNAMDVVLQPSPALSWRSTGGILDVYIFLGPEPKSVVQQYLDVVGYPFMPPYWGLGFHLCRWGYSSTAITRQVVENMTRAHFPLDVQWNDLDYMDSRRDFTFNKDGFRDFPAMVQELHQGGRRYMMIVDPAISSSGPAGSYRPYDEGLRRGVFITNETGQPLIGKVWPGSTAFPDFTNPTALAWWEDMVAEFHDQVPFDGMWIDMNEPSNFIRGSEDGCPNNELENPPYVPGVVGGTLQAATICASSHQFLSTHYNLHNLYGLTEAIASHRALVKARGTRPFVISRSTFAGHGRYAGHWTGDVWSSWEQLASSVPEILQFNLLGVPLVGADVCGFLGNTSEELCVRWTQLGAFYPFMRNHNSLLSLPQEPYSFSEPAQQAMRKALTLRYALLPHLYTLFHQAHVAGETVARPLFLEFPKDSSTWTVDHQLLWGEALLITPVLQAGKAEVTGYFPLGTWYDLQTVPVEALGSLPPPPAAPREPAIHSEGQWVTLPAPLDTINVHLRAGYIIPLQGPGLTTTESRQQPMALAVALTKGGEARGELFWDDGESLEVLERGAYTQVIFLARNNTIVNELVRVTSEGAGLQLQKVTVLGVATAPQQVLSNGVPVSNFTYSPDTKVLDICVSLLMGEQFLVSWC

SEQ ID NO: 692 - protein, 1143 aa, synthetic construct
  REGION 1..1143: note = Synthetic
DIVMTQSPLSLPVTPGEPASISCRSSQSLLHSNGYNYLDWYLQKPGQSPQFLIYLGSNRASGVPDRFSGSGSGTDFTLKINRVEAEDVGVYYCMQALQTPYTFGQGTKLEIKGGGGSGGGGSGGGGSQVQLVESGGGLVKPGGSLRLSCAASGFTFSVYYMNWIRQAPGKGLEWVSYISSSGSTIYYADSVKGRFTISRDNAKNSLYLQMNSLRAEDTAVYYCGREGYSGTYSYYGMDVWGQGTTVTVSSGGGGSGGGGSAHPGRPRAVPTQCDVPPNSRFDCAPDKAITQEQCEARGCCYIPAKQGLQGAQMGQPWCFFPPSYPSYKLENLSSSEMGYTATLTRTTPTFFPKDILTLRLDVMMETENRLHFTIKDPANRRYEVPLETPHVHSRAPSPLYSVEFSEEPFGVIVRRQLDGRVLLNTTVAPLFFADQFLQLSTSLPSQYITGLAEHLSPLMLSTSWTRITLWNRDLAPTPGANLYGSHPFYLALEDGGSAHGVFLLNSNAMDVVLQPSPALSWRSTGGILDVYIFLGPEPKSVVQQYLDVVGYPFMPPYWGLGFHLCRWGYSSTAITRQVVENMTRAHFPLDVQWNDLDYMDSRRDFTFNKDGFRDFPAMVQELHQGGRRYMMIVDPAISSSGPAGSYRPYDEGLRRGVFITNETGQPLIGKVWPGSTAFPDFTNPTALAWWEDMVAEFHDQVPFDGMWIDMNEPSNFIRGSEDGCPNNELENPPYVPGVVGGTLQAATICASSHQFLSTHYNLHNLYGLTEAIASHRALVKARGTRPFVISRSTFAGHGRYAGHWTGDVWSSWEQLASSVPEILQFNLLGVPLVGADVCGFLGNTSEELCVRWTQLGAFYPFMRNHNSLLSLPQEPYSFSEPAQQAMRKALTLRYALLPHLYTLFHQAHVAGETVARPLFLEFPKDSSTWTVDHQLLWGEALLITPVLQAGKAEVTGYFPLGTWYDLQTVPVEALGSLPPPPAAPREPAIHSEGQWVTLPAPLDTINVHLRAGYIIPLQGPGLTTTESRQQPMALAVALTKGGEARGELFWDDGESLEVLERGAYTQVIFLARNNTIVNELVRVTSEGAGLQLQKVTVLGVATAPQQVLSNGVPVSNFTYSPDTKVLDICVSLLMGEQFLVSWC

SEQ ID NO: 693 - protein, 1137 aa, synthetic construct
  REGION 1..1137: note = Synthetic
DIQMTQSPSSLSASVGDRVTITCRASQDISHYSAWYQQKPGKLPNLLIYAASTLQSGVPSRFSGSGSGTDFSLTTSSLQPEDVATYYCQKYNSVPLTFGGGTKVEIKGGGGSGGGGSGGGGSEVQLVESGGGLVQPGRSLRLSCAVSGFTFDDYAMHWVRQAPGKGLEWVSGISWNSGTRGYADSVKGRFTISRDNAKNSLYLQMNSLRGEDTALYYCVKDITISPNYYGMDVWGQGTTVTVSSGGGGSGGGGSAHPGRPRAVPTQCDVPPNSRFDCAPDKAITQEQCEARGCCYIPAKQGLQGAQMGQPWCFFPPSYPSYKLENLSSSEMGYTATLTRTTPTFFPKDILTLRLDVMMETENRLHFTIKDPANRRYEVPLETPHVHSRAPSPLYSVEFSEEPFGVIVRRQLDGRVLLNTTVAPLFFADQFLQLSTSLPSQYITGLAEHLSPLMLSTSWTRITLWNRDLAPTPGANLYGSHPFYLALEDGGSAHGVFLLNSNAMDVVLQPSPALSWRSTGGILDVYIFLGPEPKSVVQQYLDVVGYPFMPPYWGLGFHLCRWGYSSTAITRQVVENMTRAHFPLDVQWNDLDYMDSRRDFTFNKDGFRDFPAMVQELHQGGRRYMMIVDPAISSSGPAGSYRPYDEGLRRGVFITNETGQPLIGKVWPGSTAFPDFTNPTALAWWEDMVAEFHDQVPFDGMWIDMNEPSNFIRGSEDGCPNNELENPPYVPGVVGGTLQAATICASSHQFLSTHYNLHNLYGLTEAIASHRALVKARGTRPFVISRSTFAGHGRYAGHWTGDVWSSWEQLASSVPEILQFNLLGVPLVGADVCGFLGNTSEELCVRWTQLGAFYPFMRNHNSLLSLPQEPYSFSEPAQQAMRKALTLRYALLPHLYTLFHQAHVAGETVARPLFLEFPKDSSTWTVDHQLLWGEALLITPVLQAGKAEVTGYFPLGTWYDLQTVPVEALGSLPPPPAAPREPAIHSEGQWVTLPAPLDTINVHLRAGYIIPLQGPGLTTTESRQQPMALAVALTKGGEARGELFWDDGESLEVLERGAYTQVIFLARNNTIVNELVRVTSEGAGLQLQKVTVLGVATAPQQVLSNGVPVSNFTYSPDTKVLDICVSLLMGEQFLVSWC

SEQ ID NO: 694 - protein, 1132 aa, synthetic construct
  REGION 1..1132: note = Synthetic
DIQMTQSPSSLSASVGDRVTITCRASQSIDRYLNWYRQKPGKAPKLLIYTTSSLQSGVPSRFSGSGSGTDFTLTLSSLQPEDFATYYCQQSYSPPLTFGGGTKVEIKGGGGSGGGGSGGGGSQVQLVESGGGVVQPGRSLRLSCAASGFTFSSYGMHWVRQAPGKGLEWVAVIWYDGSNKYYADSVKGRFTISRDISKNTLYLQMNSLRAEDTAVYYCAGQLDLFFDYWGQGTLVTVSSGGGGSGGGGSAHPGRPRAVPTQCDVPPNSRFDCAPDKAITQEQCEARGCCYIPAKQGLQGAQMGQPWCFFPPSYPSYKLENLSSSEMGYTATLTRTTPTFFPKDILTLRLDVMMETENRLHFTIKDPANRRYEVPLETPHVHSRAPSPLYSVEFSEEPFGVIVRRQLDGRVLLNTTVAPLFFADQFLQLSTSLPSQYITGLAEHLSPLMLSTSWTRITLWNRDLAPTPGANLYGSHPFYLALEDGGSAHGVFLLNSNAMDVVLQPSPALSWRSTGGILDVYIFLGPEPKSVVQQYLDVVGYPFMPPYWGLGFHLCRWGYSSTAITRQVVENMTRAHFPLDVQWNDLDYMDSRRDFTFNKDGFRDFPAMVQELHQGGRRYMMIVDPAISSSGPAGSYRPYDEGLRRGVFITNETGQPLIGKVWPGSTAFPDFTNPTALAWWEDMVAEFHDQVPFDGMWIDMNEPSNFIRGSEDGCPNNELENPPYVPGVVGGTLQAATICASSHQFLSTHYNLHNLYGLTEAIASHRALVKARGTRPFVISRSTFAGHGRYAGHWTGDVWSSWEQLASSVPEILQFNLLGVPLVGADVCGFLGNTSEELCVRWTQLGAFYPFMRNHNSLLSLPQEPYSFSEPAQQAMRKALTLRYALLPHLYTLFHQAHVAGETVARPLFLEFPKDSSTWTVDHQLLWGEALLITPVLQAGKAEVTGYFPLGTWYDLQTVPVEALGSLPPPPAAPREPAIHSEGQWVTLPAPLDTINVHLRAGYIIPLQGPGLTTTESRQQPMALAVALTKGGEARGELFWDDGESLEVLERGAYTQVIFLARNNTIVNELVRVTSEGAGLQLQKVTVLGVATAPQQVLSNGVPVSNFTYSPDTKVLDICVSLLMGEQFLVSWC

SEQ ID NO: 695 - protein, 1140 aa, synthetic construct
  REGION 1..1140: note = Synthetic
DIQMTQSPSSVSASVGDRVTITCRASQGISSWLAWYQQKPGKAPKLLIYAASSLQSGVPSRFSGSGSGTDFTLTISSLQPEDFATYYCQKADSLPYAFGQGTKLEIKGGGGSGGGGSGGGGSEVQLVESGGGLVQPGGSLRLSCTASGFTFSNYWMTWVRQAPGKGLEWVANIKEDGSEKEYVDSVKGRFTISRDNAKNSLYLQMNSLRGEDTAVYYCARDGEQLVDYYYYYVMDVWGQGTTVTVSSGGGGSGGGGSAHPGRPRAVPTQCDVPPNSRFDCAPDKAITQEQCEARGCCYIPAKQGLQGAQMGQPWCFFPPSYPSYKLENLSSSEMGYTATLTRTTPTFFPKDILTLRLDVMMETENRLHFTIKDPANRRYEVPLETPHVHSRAPSPLYSVEFSEEPFGVIVRRQLDGRVLLNTTVAPLFFADQFLQLSTSLPSQYITGLAEHLSPLMLSTSWTRITLWNRDLAPTPGANLYGSHPFYLALEDGGSAHGVFLLNSNAMDVVLQPSPALSWRSTGGILDVYIFLGPEPKSVVQQYLDVVGYPFMPPYWGLGFHLCRWGYSSTAITRQVVENMTRAHFPLDVQWNDLDYMDSRRDFTFNKDGFRDFPAMVQELHQGGRRYMMIVDPAISSSGPAGSYRPYDEGLRRGVFITNETGQPLIGKVWPGSTAFPDFTNPTALAWWEDMVAEFHDQVPFDGMWIDMNEPSNFIRGSEDGCPNNELENPPYVPGVVGGTLQAATICASSHQFLSTHYNLHNLYGLTEAIASHRALVKARGTRPFVISRSTFAGHGRYAGHWTGDVWSSWEQLASSVPEILQFNLLGVPLVGADVCGFLGNTSEELCVRWTQLGAFYPFMRNHNSLLSLPQEPYSFSEPAQQAMRKALTLRYALLPHLYTLFHQAHVAGETVARPLFLEFPKDSSTWTVDHQLLWGEALLITPVLQAGKAEVTGYFPLGTWYDLQTVPVEALGSLPPPPAAPREPAIHSEGQWVTLPAPLDTINVHLRAGYIIPLQGPGLTTTESRQQPMALAVALTKGGEARGELFWDDGESLEVLERGAYTQVIFLARNNTIVNELVRVTSEGAGLQLQKVTVLGVATAPQQVLSNGVPVSNFTYSPDTKVLDICVSLLMGEQFLVSWC

SEQ ID NO: 696 - protein, 1142 aa, synthetic construct
  REGION 1..1142: note = Synthetic
DIQMTQSPSSLSASVGDRVTITCRASQSISSYLNWYQQKPGKAPKVLIYAASSLQSGVPSRFSGSGSGTDFTLTISSLQPEDFATYYCQQSYSIPLTFGGGTKVEIKGGGGSGGGGSGGGGSEVQLVESGGGLVQPGRSLRLSCAASGFTFDDYAMHWVRQAPGKGLEWVSGISWNSGYIGYADSVKGRFTISRDNAENSLHLQMNSLRAEDTALYYCARGGSTLVRGVKGGYYGMDVWGQGTTVTVSSGGGGSGGGGSAHPGRPRAVPTQCDVPPNSRFDCAPDKAITQEQCEARGCCYIPAKQGLQGAQMGQPWCFFPPSYPSYKLENLSSSEMGYTATLTRTTPTFFPKDILTLRLDVMMETENRLHFTIKDPANRRYEVPLETPHVHSRAPSPLYSVEFSEEPFGVIVRRQLDGRVLLNTTVAPLFFADQFLQLSTSLPSQYITGLAEHLSPLMLSTSWTRITLWNRDLAPTPGANLYGSHPFYLALEDGGSAHGVFLLNSNAMDVVLQPSPALSWRSTGGILDVYIFLGPEPKSVVQQYLDVVGYPFMPPYWGLGFHLCRWGYSSTAITRQVVENMTRAHFPLDVQWNDLDYMDSRRDFTFNKDGFRDFPAMVQELHQGGRRYMMIVDPAISSSGPAGSYRPYDEGLRRGVFITNETGQPLIGKVWPGSTAFPDFTNPTALAWWEDMVAEFHDQVPFDGMWIDMNEPSNFIRGSEDGCPNNELENPPYVPGVVGGTLQAATICASSHQFLSTHYNLHNLYGLTEAIASHRALVKARGTRPFVISRSTFAGHGRYAGHWTGDVWSSWEQLASSVPEILQFNLLGVPLVGADVCGFLGNTSEELCVRWTQLGAFYPFMRNHNSLLSLPQEPYSFSEPAQQAMRKALTLRYALLPHLYTLFHQAHVAGETVARPLFLEFPKDSSTWTVDHQLLWGEALLITPVLQAGKAEVTGYFPLGTWYDLQTVPVEALGSLPPPPAAPREPAIHSEGQWVTLPAPLDTINVHLRAGYIIPLQGPGLTTTESRQQPMALAVALTKGGEARGELFWDDGESLEVLERGAYTQVIFLARNNTIVNELVRVTSEGAGLQLQKVTVLGVATAPQQVLSNGVPVSNFTYSPDTKVLDICVSLLMGEQFLVSWC

SEQ ID NO: 697 - protein, 1131 aa, synthetic construct
  REGION 1..1131: note = Synthetic
EIVMTQSPATLSVSPGERATLSCRASQSVSSNFAWYQQKPGQAPRLLIYSASSRATGIPVRFSGSGSGTEFTLTISSLQSEDFAVYYCQQYNIWPRTFGQGTKVEIKGGGGSGGGGSGGGGSEVQLVESGGGLVQPGGSLRLSCAVSGFIFSSYEMNWVRQAPGKGLEWVSYISSSGSTIFYADSVKGRFTISRDNAKNSLYLQMNSLRAEDTAVYYCVSGVVLFDVWGQGTMVTVSSGGGGSGGGGSAHPGRPRAVPTQCDVPPNSRFDCAPDKAITQEQCEARGCCYIPAKQGLQGAQMGQPWCFFPPSYPSYKLENLSSSEMGYTATLTRTTPTFFPKDILTLRLDVMMETENRLHFTIKDPANRRYEVPLETPHVHSRAPSPLYSVEFSEEPFGVIVRRQLDGRVLLNTTVAPLFFADQFLQLSTSLPSQYITGLAEHLSPLMLSTSWTRITLWNRDLAPTPGANLYGSHPFYLALEDGGSAHGVFLLNSNAMDVVLQPSPALSWRSTGGILDVYIFLGPEPKSVVQQYLDVVGYPFMPPYWGLGFHLCRWGYSSTAITRQVVENMTRAHFPLDVQWNDLDYMDSRRDFTFNKDGFRDFPAMVQELHQGGRRYMMIVDPAISSSGPAGSYRPYDEGLRRGVFITNETGQPLIGKVWPGSTAFPDFTNPTALAWWEDMVAEFHDQVPFDGMWIDMNEPSNFIRGSEDGCPNNELENPPYVPGVVGGTLQAATICASSHQFLSTHYNLHNLYGLTEAIASHRALVKARGTRPFVISRSTFAGHGRYAGHWTGDVWSSWEQLASSVPEILQFNLLGVPLVGADVCGFLGNTSEELCVRWTQLGAFYPFMRNHNSLLSLPQEPYSFSEPAQQAMRKALTLRYALLPHLYTLFHQAHVAGETVARPLFLEFPKDSSTWTVDHQLLWGEALLITPVLQAGKAEVTGYFPLGTWYDLQTVPVEALGSLPPPPAAPREPAIHSEGQWVTLPAPLDTINVHLRAGYIIPLQGPGLTTTESRQQPMALAVALTKGGEARGELFWDDGESLEVLERGAYTQVIFLARNNTIVNELVRVTSEGAGLQLQKVTVLGVATAPQQVLSNGVPVSNFTYSPDTKVLDICVSLLMGEQFLVSWC

SEQ ID NO: 698 - protein, 1140 aa, synthetic construct
  REGION 1..1140: note = Synthetic
DIQMTQSPSSVSASVGDRVTITCRASQGISSWLAWYQQKPGKAPKLLIYAASSLQSGVPSRFSGSGSGTDFTLTISSLQPEDFATYYCQKANSFPYTFGQGTKLEIKGGGGSGGGGSGGGGSEVQLVESGGGLVQPGGSLRLSCAASGFTFSNYWMTWVRQAPGKGLEWVANIKEDGSEKDYVDSVKGRFTISRDNAKNSLYLQMNSLRGEDTAVYYCARDGEQLVDYYYYYVMDVWGQGTTVTVSSGGGGSGGGGSAHPGRPRAVPTQCDVPPNSRFDCAPDKAITQEQCEARGCCYIPAKQGLQGAQMGQPWCFFPPSYPSYKLENLSSSEMGYTATLTRTTPTFFPKDILTLRLDVMMETENRLHFTIKDPANRRYEVPLETPHVHSRAPSPLYSVEFSEEPFGVIVRRQLDGRVLLNTTVAPLFFADQFLQLSTSLPSQYITGLAEHLSPLMLSTSWTRITLWNRDLAPTPGANLYGSHPFYLALEDGGSAHGVFLLNSNAMDVVLQPSPALSWRSTGGILDVYIFLGPEPKSVVQQYLDVVGYPFMPPYWGLGFHLCRWGYSSTAITRQVVENMTRAHFPLDVQWNDLDYMDSRRDFTFNKDGFRDFPAMVQELHQGGRRYMMIVDPAISSSGPAGSYRPYDEGLRRGVFITNETGQPLIGKVWPGSTAFPDFTNPTALAWWEDMVAEFHDQVPFDGMWIDMNEPSNFIRGSEDGCPNNELENPPYVPGVVGGTLQAATICASSHQFLSTHYNLHNLYGLTEAIASHRALVKARGTRPFVISRSTFAGHGRYAGHWTGDVWSSWEQLASSVPEILQFNLLGVPLVGADVCGFLGNTSEELCVRWTQLGAFYPFMRNHNSLLSLPQEPYSFSEPAQQAMRKALTLRYALLPHLYTLFHQAHVAGETVARPLFLEFPKDSSTWTVDHQLLWGEALLITPVLQAGKAEVTGYFPLGTWYDLQTVPVEALGSLPPPPAAPREPAIHSEGQWVTLPAPLDTINVHLRAGYIIPLQGPGLTTTESRQQPMALAVALTKGGEARGELFWDDGESLEVLERGAYTQVIFLARNNTIVNELVRVTSEGAGLQLQKVTVLGVATAPQQVLSNGVPVSNFTYSPDTKVLDICVSLLMGEQFLVSWC

SEQ ID NO: 699 - protein, 1135 aa, synthetic construct
  REGION 1..1135: note = Synthetic
DIQLTQSPSSLSASVGDRVTITCWASQGISSYLAWYQQKPGKAPKLLIYAASTLQSGVPSRFSGSGSGTEFTLTISSLQPEDFATYYCQQLNSYPLTFGGGTKVEIKGGGGSGGGGSGGGGSQVQLVESGGGVVQPGRSLRLSCIASGFTFSVYGIHWVRQAPGKGLEWMAVISHDGNIKHYADSVKGRFTISRDNSKNTLYLQINSLRTEDTAVYYCAKDTWNSLDTFDIWGQGTMVTVSSGGGGSGGGGSAHPGRPRAVPTQCDVPPNSRFDCAPDKAITQEQCEARGCCYIPAKQGLQGAQMGQPWCFFPPSYPSYKLENLSSSEMGYTATLTRTTPTFFPKDILTLRLDVMMETENRLHFTIKDPANRRYEVPLETPHVHSRAPSPLYSVEFSEEPFGVIVRRQLDGRVLLNTTVAPLFFADQFLQLSTSLPSQYITGLAEHLSPLMLSTSWTRITLWNRDLAPTPGANLYGSHPFYLALEDGGSAHGVFLLNSNAMDVVLQPSPALSWRSTGGILDVYIFLGPEPKSVVQQYLDVVGYPFMPPYWGLGFHLCRWGYSSTAITRQVVENMTRAHFPLDVQWNDLDYMDSRRDFTFNKDGFRDFPAMVQELHQGGRRYMMIVDPAISSSGPAGSYRPYDEGLRRGVFITNETGQPLIGKVWPGSTAFPDFTNPTALAWWEDMVAEFHDQVPFDGMWIDMNEPSNFIRGSEDGCPNNELENPPYVPGVVGGTLQAATICASSHQFLSTHYNLHNLYGLTEAIASHRALVKARGTRPFVISRSTFAGHGRYAGHWTGDVWSSWEQLASSVPEILQFNLLGVPLVGADVCGFLGNTSEELCVRWTQLGAFYPFMRNHNSLLSLPQEPYSFSEPAQQAMRKALTLRYALLPHLYTLFHQAHVAGETVARPLFLEFPKDSSTWTVDHQLLWGEALLITPVLQAGKAEVTGYFPLGTWYDLQTVPVEALGSLPPPPAAPREPAIHSEGQWVTLPAPLDTINVHLRAGYIIPLQGPGLTTTESRQQPMALAVALTKGGEARGELFWDDGESLEVLERGAYTQVIFLARNNTIVNELVRVTSEGAGLQLQKVTVLGVATAPQQVLSNGVPVSNFTYSPDTKVLDICVSLLMGEQFLVSWC

SEQ ID NO: 700 - protein, 1135 aa, synthetic construct
  REGION 1..1135: note = Synthetic
AIQMTQSPSSLSASVGDRVTITCRASQGIRNDLGWYQQKPGKAPKLLIYAASTLQSGVPSRFSGSGSGTDFTLTISSLQPEDFATYYCLQDYNYPFTFGPGTKVDIKGGGGSGGGGSGGGGSQVTLRESGPALVKPSQTLTLTCTFSGFSLNTYGMFVSWIRQPPGKALEWLAHIHWDDDKYYSTSLKTRLTISKDTSKNQVVLTMTNMDPVDTATYYCARGHNNLNYIIHWGQGTLVTVSSGGGGSGGGGSAHPGRPRAVPTQCDVPPNSRFDCAPDKAITQEQCEARGCCYIPAKQGLQGAQMGQPWCFFPPSYPSYKLENLSSSEMGYTATLTRTTPTFFPKDILTLRLDVMMETENRLHFTIKDPANRRYEVPLETPHVHSRAPSPLYSVEFSEEPFGVIVRRQLDGRVLLNTTVAPLFFADQFLQLSTSLPSQYITGLAEHLSPLMLSTSWTRITLWNRDLAPTPGANLYGSHPFYLALEDGGSAHGVFLLNSNAMDVVLQPSPALSWRSTGGILDVYIFLGPEPKSVVQQYLDVVGYPFMPPYWGLGFHLCRWGYSSTAITRQVVENMTRAHFPLDVQWNDLDYMDSRRDFTFNKDGFRDFPAMVQELHQGGRRYMMIVDPAISSSGPAGSYRPYDEGLRRGVFITNETGQPLIGKVWPGSTAFPDFTNPTALAWWEDMVAEFHDQVPFDGMWIDMNEPSNFIRGSEDGCPNNELENPPYVPGVVGGTLQAATICASSHQFLSTHYNLHNLYGLTEAIASHRALVKARGTRPFVISRSTFAGHGRYAGHWTGDVWSSWEQLASSVPEILQFNLLGVPLVGADVCGFLGNTSEELCVRWTQLGAFYPFMRNHNSLLSLPQEPYSFSEPAQQAMRKALTLRYALLPHLYTLFHQAHVAGETVARPLFLEFPKDSSTWTVDHQLLWGEALLITPVLQAGKAEVTGYFPLGTWYDLQTVPVEALGSLPPPPAAPREPAIHSEGQWVTLPAPLDTINVHLRAGYIIPLQGPGLTTTESRQQPMALAVALTKGGEARGELFWDDGESLEVLERGAYTQVIFLARNNTIVNELVRVTSEGAGLQLQKVTVLGVATAPQQVLSNGVPVSNFTYSPDTKVLDICVSLLMGEQFLVSWC

SEQ ID NO: 701 - protein, 1138 aa, synthetic construct
  REGION 1..1138: note = Synthetic
EIVLTQSPATLSLSPGERATLSCRASQSVSSYLAWYQQKPGQAPRLLIHDVSNRATGIPARFSGSGSGTDFTLTISSLEPEDFVVYYCQQRSDWPITFGQGTRLEIKGGGGSGGGGSGGGGSEVQLVESGGGLVQPGRSLRLSCAASGFTFDDKAMHWVRQVPGKGLEWISGISWNSGTIGYADSVKGRFIISRDNAKNSLYLQMNSLRAEDTALYYCAKDGDTSGWYWYGLDVWGQGTTVTVSSGGGGSGGGGSAHPGRPRAVPTQCDVPPNSRFDCAPDKAITQEQCEARGCCYIPAKQGLQGAQMGQPWCFFPPSYPSYKLENLSSSEMGYTATLTRTTPTFFPKDILTLRLDVMMETENRLHFTIKDPANRRYEVPLETPHVHSRAPSPLYSVEFSEEPFGVIVRRQLDGRVLLNTTVAPLFFADQFLQLSTSLPSQYITGLAEHLSPLMLSTSWTRITLWNRDLAPTPGANLYGSHPFYLALEDGGSAHGVFLLNSNAMDVVLQPSPALSWRSTGGILDVYIFLGPEPKSVVQQYLDVVGYPFMPPYWGLGFHLCRWGYSSTAITRQVVENMTRAHFPLDVQWNDLDYMDSRRDFTFNKDGFRDFPAMVQELHQGGRRYMMIVDPAISSSGPAGSYRPYDEGLRRGVFITNETGQPLIGKVWPGSTAFPDFTNPTALAWWEDMVAEFHDQVPFDGMWIDMNEPSNFIRGSEDGCPNNELENPPYVPGVVGGTLQAATICASSHQFLSTHYNLHNLYGLTEAIASHRALVKARGTRPFVISRSTFAGHGRYAGHWTGDVWSSWEQLASSVPEILQFNLLGVPLVGADVCGFLGNTSEELCVRWTQLGAFYPFMRNHNSLLSLPQEPYSFSEPAQQAMRKALTLRYALLPHLYTLFHQAHVAGETVARPLFLEFPKDSSTWTVDHQLLWGEALLITPVLQAGKAEVTGYFPLGTWYDLQTVPVEALGSLPPPPAAPREPAIHSEGQWVTLPAPLDTINVHLRAGYIIPLQGPGLTTTESRQQPMALAVALTKGGEARGELFWDDGESLEVLERGAYTQVIFLARNNTIVNELVRVTSEGAGLQLQKVTVLGVATAPQQVLSNGVPVSNFTYSPDTKVLDICVSLLMGEQFLVSWC

SEQ ID NO: 702 - protein, 1137 aa, synthetic construct
  REGION 1..1137: note = Synthetic
DIQMTQSPSSLSASVGDRVTITCRASQSIRNVLGWFQQKPGKAPQRLIYAASSLQSGVPSRFSGSGSGTEFTLTISSLQPEDFATYYCLQHNFYPLTFGGGTKVEIKGGGGSGGGGSGGGGSQVQLVESGGGVVQPGRSLRLSCAASGFTFTTYGMHWVRQAPGKGLEWVAVIWYDGSNKYYGDSVKGRFTISRDNSKNTLYLQMNSLRVDDTAVYYCTRTHGYTRSSDGFDYWGQGTLVTVSSGGGGSGGGGSAHPGRPRAVPTQCDVPPNSRFDCAPDKAITQEQCEARGCCYIPAKQGLQGAQMGQPWCFFPPSYPSYKLENLSSSEMGYTATLTRTTPTFFPKDILTLRLDVMMETENRLHFTIKDPANRRYEVPLETPHVHSRAPSPLYSVEFSEEPFGVIVRRQLDGRVLLNTTVAPLFFADQFLQLSTSLPSQYITGLAEHLSPLMLSTSWTRITLWNRDLAPTPGANLYGSHPFYLALEDGGSAHGVFLLNSNAMDVVLQPSPALSWRSTGGILDVYIFLGPEPKSVVQQYLDVVGYPFMPPYWGLGFHLCRWGYSSTAITRQVVENMTRAHFPLDVQWNDLDYMDSRRDFTFNKDGFRDFPAMVQELHQGGRRYMMIVDPAISSSGPAGSYRPYDEGLRRGVFITNETGQPLIGKVWPGSTAFPDFTNPTALAWWEDMVAEFHDQVPFDGMWIDMNEPSNFIRGSEDGCPNNELENPPYVPGVVGGTLQAATICASSHQFLSTHYNLHNLYGLTEAIASHRALVKARGTRPFVISRSTFAGHGRYAGHWTGDVWSSWEQLASSVPEILQFNLLGVPLVGADVCGFLGNTSEELCVRWTQLGAFYPFMRNHNSLLSLPQEPYSFSEPAQQAMRKALTLRYALLPHLYTLFHQAHVAGETVARPLFLEFPKDSSTWTVDHQLLWGEALLITPVLQAGKAEVTGYFPLGTWYDLQTVPVEALGSLPPPPAAPREPAIHSEGQWVTLPAPLDTINVHLRAGYIIPLQGPGLTTTESRQQPMALAVALTKGGEARGELFWDDGESLEVLERGAYTQVIFLARNNTIVNELVRVTSEGAGLQLQKVTVLGVATAPQQVLSNGVPVSNFTYSPDTKVLDICVSLLMGEQFLVSWC

SEQ ID NO: 703 - protein, 1168 aa, synthetic construct
  REGION 1..1168: note = Synthetic
MHRPRRRGTRPPPLALLAALLLAARGADADIQMTQSPSSVSASVGDRVTITCRASQGIASWLAWYQQKPGKAPELLIYAASSLQGGVPSRFSGSGSGTDFTLTISSLQPEDFAIYYCQQANYFPWTFGQGTKVEIKGGGGSGGGGSGGGGSQITLKESGPTLVKPTQTLTLTCTFSGFSLSTSGVGVVWIRQPPGKALEWLALIYWNDHKRYSPSLGSRLTITKDTSKNQVVLTMTNMDPVDTATYYCAHYSGSYSYYYYGLDVWGQGTTVTVSSGGGGSGGGGSAHPGRPRAVPTQCDVPPNSRFDCAPDKAITQEQCEARGCCYIPAKQGLQGAQMGQPWCFFPPSYPSYKLENLSSSEMGYTATLTRTTPTFFPKDILTLRLDVMMETENRLHFTIKDPANRRYEVPLETPHVHSRAPSPLYSVEFSEEPFGVIVRRQLDGRVLLNTTVAPLFFADQFLQLSTSLPSQYITGLAEHLSPLMLSTSWTRITLWNRDLAPTPGANLYGSHPFYLALEDGGSAHGVFLLNSNAMDVVLQPSPALSWRSTGGILDVYIFLGPEPKSVVQQYLDVVGYPFMPPYWGLGFHLCRWGYSSTAITRQVVENMTRAHFPLDVQWNDLDYMDSRRDFTFNKDGFRDFPAMVQELHQGGRRYMMIVDPAISSSGPAGSYRPYDEGLRRGVFITNETGQPLIGKVWPGSTAFPDFTNPTALAWWEDMVAEFHDQVPFDGMWIDMNEPSNFIRGSEDGCPNNELENPPYVPGVVGGTLQAATICASSHQFLSTHYNLHNLYGLTEAIASHRALVKARGTRPFVISRSTFAGHGRYAGHWTGDVWSSWEQLASSVPEILQFNLLGVPLVGADVCGFLGNTSEELCVRWTQLGAFYPFMRNHNSLLSLPQEPYSFSEPAQQAMRKALTLRYALLPHLYTLFHQAHVAGETVARPLFLEFPKDSSTWTVDHQLLWGEALLITPVLQAGKAEVTGYFPLGTWYDLQTVPVEALGSLPPPPAAPREPAIHSEGQWVTLPAPLDTINVHLRAGYIIPLQGPGLTTTESRQQPMALAVALTKGGEARGELFWDDGESLEVLERGAYTQVIFLARNNTIVNELVRVTSEGAGLQLQKVTVLGVATAPQQVLSNGVPVSNFTYSPDTKVLDICVSLLMGEQFLVSWC

SEQ ID NO: 704 - protein, 1171 aa, synthetic construct
  REGION 1..1171: note = Synthetic
MHRPRRRGTRPPPLALLAALLLAARGADADIQMTQSPSSLSASVGDRVTITCRASQSISSYLNWYQQKPGKAPKLLIYAASSLQSGVPSRFSGSGSGTDFTLTISSLQPEDFATYYCQQSYSTPPITFGQGTRLEIKGGGGSGGGGSGGGGSQVQLVESGGGVVQPGRSLRLSCAASGFPFSNYVMYWVRQAPGKGLEWVALIFFDGKKNYHADSVKGRFTITRDNSKNMLYLQMNSLRPEDAAVYYCAKIHCPNGVCYKGYYGMDVWGQGTTVTVSSGGGGSGGGGSAHPGRPRAVPTQCDVPPNSRFDCAPDKAITQEQCEARGCCYIPAKQGLQGAQMGQPWCFFPPSYPSYKLENLSSSEMGYTATLTRTTPTFFPKDILTLRLDVMMETENRLHFTIKDPANRRYEVPLETPHVHSRAPSPLYSVEFSEEPFGVIVRRQLDGRVLLNTTVAPLFFADQFLQLSTSLPSQYITGLAEHLSPLMLSTSWTRITLWNRDLAPTPGANLYGSHPFYLALEDGGSAHGVFLLNSNAMDVVLQPSPALSWRSTGGILDVYIFLGPEPKSVVQQYLDVVGYPFMPPYWGLGFHLCRWGYSSTAITRQVVENMTRAHFPLDVQWNDLDYMDSRRDFTFNKDGFRDFPAMVQELHQGGRRYMMIVDPAISSSGPAGSYRPYDEGLRRGVFITNETGQPLIGKVWPGSTAFPDFTNPTALAWWEDMVAEFHDQVPFDGMWIDMNEPSNFIRGSEDGCPNNELENPPYVPGVVGGTLQAATICASSHQFLSTHYNLHNLYGLTEAIASHRALVKARGTRPFVISRSTFAGHGRYAGHWTGDVWSSWEQLASSVPEILQFNLLGVPLVGADVCGFLGNTSEELCVRWTQLGAFYPFMRNHNSLLSLPQEPYSFSEPAQQAMRKALTLRYALLPHLYTLFHQAHVAGETVARPLFLEFPKDSSTWTVDHQLLWGEALLITPVLQAGKAEVTGYFPLGTWYDLQTVPVEALGSLPPPPAAPREPAIHSEGQWVTLPAPLDTINVHLRAGYIIPLQGPGLTTTESRQQPMALAVALTKGGEARGELFWDDGESLEVLERGAYTQVIFLARNNTIVNELVRVTSEGAGLQLQKVTVLGVATAPQQVLSNGVPVSNFTYSPDTKVLDICVSLLMGEQFLVSWC

SEQ ID NO: 705 - protein, 1164 aa, synthetic construct
  REGION 1..1164: note = Synthetic
MHRPRRRGTRPPPLALLAALLLAARGADADIQMTQSPSSLSASVGDRVTITCRASQSISSYLNWYQQKPGKAPKLLIYAASSLQSGVPSRFSGSGSGTDFTLTISSLQPEDFATYYCQQSYSTPPITFGQGTRLEIKGGGGSGGGGSGGGGSEVQLVESGGGLVQPGGSLRLSCAASGFTFNIFEMNWVRQAPGKGLEWISYISSRGTTTYYADSVRGRFTISRDNAKNSLYLQMNSLRAEDTAVYYCARDYEATIPFDFWGQGTLVTVSSGGGGSGGGGSAHPGRPRAVPTQCDVPPNSRFDCAPDKAITQEQCEARGCCYIPAKQGLQGAQMGQPWCFFPPSYPSYKLENLSSSEMGYTATLTRTTPTFFPKDILTLRLDVMMETENRLHFTIKDPANRRYEVPLETPHVHSRAPSPLYSVEFSEEPFGVIVRRQLDGRVLLNTTVAPLFFADQFLQLSTSLPSQYITGLAEHLSPLMLSTSWTRITLWNRDLAPTPGANLYGSHPFYLALEDGGSAHGVFLLNSNAMDVVLQPSPALSWRSTGGILDVYIFLGPEPKSVVQQYLDVVGYPFMPPYWGLGFHLCRWGYSSTAITRQVVENMTRAHFPLDVQWNDLDYMDSRRDFTFNKDGFRDFPAMVQELHQGGRRYMMIVDPAISSSGPAGSYRPYDEGLRRGVFITNETGQPLIGKVWPGSTAFPDFTNPTALAWWEDMVAEFHDQVPFDGMWIDMNEPSNFIRGSEDGCPNNELENPPYVPGVVGGTLQAATICASSHQFLSTHYNLHNLYGLTEAIASHRALVKARGTRPFVISRSTFAGHGRYAGHWTGDVWSSWEQLASSVPEILQFNLLGVPLVGADVCGFLGNTSEELCVRWTQLGAFYPFMRNHNSLLSLPQEPYSFSEPAQQAMRKALTLRYALLPHLYTLFHQAHVAGETVARPLFLEFPKDSSTWTVDHQLLWGEALLITPVLQAGKAEVTGYFPLGTWYDLQTVPVEALGSLPPPPAAPREPAIHSEGQWVTLPAPLDTINVHLRAGYIIPLQGPGLTTTESRQQPMALAVALTKGGEARGELFWDDGESLEVLERGAYTQVIFLARNNTIVNELVRVTSEGAGLQLQKVTVLGVATAPQQVLSNGVPVSNFTYSPDTKVLDICVSLLMGEQFLVSWC

SEQ ID NO: 706 - protein, 1166 aa, synthetic construct
  REGION 1..1166: note = Synthetic
MHRPRRRGTRPPPLALLAALLLAARGADADIQMTQSPSSLSASVGDRVTITCRASQSISSYLNWYQQKPGKAPKLLIYAASSLQSGVPSRFSGSGSGTDFTLTISSLQPEDFATYYCQQSYSTPPITFGQGTRLEIKGGGGSGGGGSGGGGSEVQLVESGGGLVQPGRSLRLSCAASGFTFDDYAMNWVRQAPGKGLEWVSGISWSSGSMDYADSVKGRFTISRDNAKNSLYLQMNSLRTEDTALYYCAKAREVGDYYGMDVWGQGTTVTVSSGGGGSGGGGSAHPGRPRAVPTQCDVPPNSRFDCAPDKAITQEQCEARGCCYIPAKQGLQGAQMGQPWCFFPPSYPSYKLENLSSSEMGYTATLTRTTPTFFPKDILTLRLDVMMETENRLHFTIKDPANRRYEVPLETPHVHSRAPSPLYSVEFSEEPFGVIVRRQLDGRVLLNTTVAPLFFADQFLQLSTSLPSQYITGLAEHLSPLMLSTSWTRITLWNRDLAPTPGANLYGSHPFYLALEDGGSAHGVFLLNSNAMDVVLQPSPALSWRSTGGILDVYIFLGPEPKSVVQQYLDVVGYPFMPPYWGLGFHLCRWGYSSTAITRQVVENMTRAHFPLDVQWNDLDYMDSRRDFTFNKDGFRDFPAMVQELHQGGRRYMMIVDPAISSSGPAGSYRPYDEGLRRGVFITNETGQPLIGKVWPGSTAFPDFTNPTALAWWEDMVAEFHDQVPFDGMWIDMNEPSNFIRGSEDGCPNNELENPPYVPGVVGGTLQAATICASSHQFLSTHYNLHNLYGLTEAIASHRALVKARGTRPFVISRSTFAGHGRYAGHWTGDVWSSWEQLASSVPEILQFNLLGVPLVGADVCGFLGNTSEELCVRWTQLGAFYPFMRNHNSLLSLPQEPYSFSEPAQQAMRKALTLRYALLPHLYTLFHQAHVAGETVARPLFLEFPKDSSTWTVDHQLLWGEALLITPVLQAGKAEVTGYFPLGTWYDLQTVPVEALGSLPPPPAAPREPAIHSEGQWVTLPAPLDTINVHLRAGYIIPLQGPGLTTTESRQQPMALAVALTKGGEARGELFWDDGESLEVLERGAYTQVIFLARNNTIVNELVRVTSEGAGLQLQKVTVLGVATAPQQVLSNGVPVSNFTYSPDTKVLDICVSLLMGEQFLVSWC

SEQ ID NO: 707 - DNA, 3411 bp, synthetic construct
  misc_feature 1..3411: note = Synthetic
  source 1..3411: mol_type = other DNA
gaggtccagcttgtggagtctggtgggggggtggtgagacctgggggcagtctgaggctgtcctgtgcagcctctggcttcacctttgatgaccatggtatgagctgggttagacaggcccctggcaaaggcctggagtgggtctcaggaatcaactggaatggagacaagacagactatgaagactctgtgaagggcagattcaccatcagcagagataatgccaaaaacagcctgtacctgcaaatgaacagtctgagagctgaggacacagccctctaccactgtgccagggacagagaggtaggtgactactatggcatggatgtatggggccagggcaccacagtcacagtgagtagtggggggggtggttcaggaggagggggatcaggagggggaggatctgacatccagatgacccaaagccctagcagcttgtctgccagtgtgggagatagagtcaccatcacctgcagggcttcacaatctatcagcagttacctgaactggtaccagcagaagccaggcaaggctcctaagctgctgatctatgctgccagcagtctacagtctggagttcctagcagattctcagggtctggaagtggcactgacttcacactgacaatcagcagtctgcaacctgaggactttgccacctactactgccagcagagctactctacacctccaatcacctttggccagggcactagactggaaatcaaggggggaggaggctctggaggaggtggttctgctcacccaggtagacccagagctgtacctactcagtgtgatgtgccccccaactctaggtttgactgtgctcctgacaaggctatcacccaagagcagtgtgaagccagaggctgctgctacatcccagctaagcaagggctgcagggagcccagatgggccagccttggtgcttctttcctccaagctaccctagctacaaacttgagaacctgtcctccagtgagatgggctatacagccacactgactaggaccacccccaccttcttccccaaagatatcctgactctaagactggatgtgatgatggagacagaaaacagactgcacttcaccatcaaagacccagccaacaggaggtatgaagtgcctctggaaactcctcatgtgcactctagggcccctagccctctgtactctgtggaattctcagaggagccctttggagtaattgtaagaagacagctggatggcagagtgctgctgaacaccactgtagcccctttgttctttgcagaccagtttctccagttatccactagcctgcctagtcagtacatcactggcctggctgagcacctgagccccctgatgctcagtacttcctggactagaatcactctctggaacagagacctggctccaactcctggtgccaacctgtatggctctcaccccttctacctagctctagaggatgggggctctgcccatggagttttcctgctgaacagcaatgccatggatgttgtgctacaaccttctcctgccctctcttggagatcaacaggagggatactggatgtgtacatcttcttaggccctgagccaaaatctgtggtgcaacagtacctggatgtggtgggatacccctttatgcccccttactgggggctgggcttccacctgtgcagatggggttacagctccacagctattaccagacaagtggtagagaacatgaccagagcacacttccctttggatgtgcagtggaatgacttagattatatggacagtagaagggacttcacctttaacaaggatggcttcagagacttccctgccatggtgcaggaactccaccagggaggcagaagatacatgatgatagtggaccctgctatcagttcttctggccctgctggcagttacagaccctatgatgaagggctaagaaggggagtgttcatcacaaatgagactggacagcctctgattggcaaggtctggcctgggagcacagccttcccagactttaccaaccccacagccctggcctggtgggaggacatggtggctgagttccatgaccaggtgccctttgatggaatgtggattgatatgaatgaaccttccaacttcatcagaggcagtgaggatggttgccccaacaatgaactagagaaccccccctatgtgcctggagttgtgggaggaaccttacaggctgccaccatatgtgcttcctctcaccagttcttgagtacacactacaacttgcacaacttatatgggttaacagaggccattgccagccacagagccctggtaaaagcaagaggaacaagaccatttgtaatcagcagaagtacctttgcaggccatgggaggtatgctggccactggactggggatgtttggagctcttgggaacaacttgcttcctctgtaccagagatcctgcagttcaaccttctaggagtccctcttgtgggagctgatgtgtgtggcttcttgggcaacaccagtgaggaactgtgtgtgaggtggactcagctgggtgccttctacccctttatgaggaaccacaacagtctgctcagcctcccccaggagccttactctttttctgagccagcccagcaggctatgagaaaagcacttaccctgagatatgcactgttaccacacctatacaccctgttccaccaggcccatgtagctggggagacagtggccagacctctcttcttggagtttcctaaggactctagcacatggacagttgaccaccagctgctctggggtgaggccctgctcatcacccctgtgctgcaggcaggcaaggcagaggtgacagggtacttccctctgggcacatggtatgacctgcagacagtccctgtagaagccctgggcagcttgcctcctccaccagctgcccctagagagcctgccatccactcagagggccagtgggtgaccctccctgcccctctagacactattaatgtgcacctgagggctggttacataatccctctgcagggccctggcctcaccactactgagtccagacaacagcccatggctctggctgtggctctgaccaagggaggagaggccagaggtgagctgttctgggatgatggagaatctctggaagtgctggagagaggagcttacacccaagtaatcttcttagccagaaacaacaccattgtcaatgagctggtgagggtgacatcagaaggtgctggcctccagctgcagaaggtgacagtactgggagtagccactgccccccagcaagtgctgagcaatggtgtgccagtcagcaacttcacatacagtcctgatacaaaggtattggacatttgtgtaagcctgctcatgggggaacagttcctggtgtcttggtgc

SEQ ID NO: 708 - DNA, 3411 bp, synthetic construct
  misc_feature 1..3411: note = Synthetic
  source 1..3411: mol_type = other DNA
gaggtgcagctggtggaatcaggggggggagtggtgcggcctggtggcagcctaagactgagttgtgctgcctctggcttcacctttgatgaccatggcatgtcttgggtgaggcaggcacctggcaagggcctggagtgggtgtctggcatcaactggaatggagacaagacagattatgaggactctgtaaagggcagattcacaatctccagagacaatgcaaaaaactcactgtacctgcagatgaacagcttaagagctgaggacactgccctgtaccactgtgccagagacagggaagttggagactactatggcatggatgtctggggtcagggcaccacagtgactgtgtcctctggaggaggaggctctggggggggtggctcagggggaggtggctctgacatccagatgacccagagccccagctccctgtctgcctctgtgggtgacagggtgaccatcacttgcagagccagccagtctatctcaagttacctcaactggtaccagcagaagcctggcaaggcccccaagctgctgatctatgctgctagcagcttgcagtcaggagtgcctagcaggttcagtggctcaggctcaggaactgacttcaccctgacaatctcctctctgcagcctgaggactttgccacctactactgccagcaaagctacagcaccccccccatcacctttggtcaaggcacaagactggagattaagggtggaggtggctctggtggaggtggctctgcccaccctggcaggcctagagcagtgcccacccagtgtgatgtacctcctaactccaggtttgactgtgcccctgacaaagccatcacccaggagcagtgcgaggccagaggctgctgctacatcccagccaagcaagggctgcagggagcccagatgggccagccttggtgcttcttccctcctagttaccctagctacaagctggagaacctcagcagctctgagatgggctacacagccaccctcaccagaacaacccccacattcttccccaaagacatcctaaccctcagactggatgtgatgatggagacagaaaacagactccacttcactatcaaggacccagcaaacagaagatatgaggtgcctctggagacacctcatgttcactccagagcccctagccctttgtactctgtggaattctcagaggagccctttggggtgatagtgagaagacaactggatggtagggtgctgctgaacacaacagtggcccccctgttctttgctgaccagttcttacagctctctacatctctgccaagccagtacatcacaggcctagctgagcacctgtcacctctgatgctgtccacctcatggaccaggatcactctgtggaacagagacttggcccccacacctggagccaacctatatgggagccaccccttctacctggctctggaggatggggggtctgcccatggagtgtttctcctgaacagcaatgctatggatgtggtcctgcaacctagccctgccctcagctggagaagcacaggaggcatcctggatgtgtacatcttcctgggcccagaacctaagagtgttgtacagcagtacctggatgtggttggctaccctttcatgcctccctactggggccttggcttccacctgtgccggtggggctactccagcacagccatcactagacaggttgtggagaacatgaccagagcccactttcccctggatgttcagtggaatgacctggactacatggacagcagaagagacttcaccttcaacaaggatggcttcagagacttccctgcaatggtgcaggaattgcaccagggaggcagaagatacatgatgattgtagaccctgccatcagctcttctggccctgcaggcagctacagaccctatgatgaaggtctgaggagaggtgtgtttatcaccaatgagactggccagcccctcataggtaaggtgtggcctggctcaacagccttccctgactttaccaatcccactgccctggcctggtgggaagatatggtggctgagttccatgaccaggtgccttttgatggcatgtggattgacatgaatgaaccttctaacttcatcagaggaagtgaggatggttgcccaaacaatgaattagagaaccctccctatgtgcctggagttgtaggtgggaccctgcaggcagctaccatctgtgcttccagccaccaatttctgtccacccactacaacttacacaacctgtatggcctgacagaagccatagccagccacagagccctggttaaggctaggggcactaggccttttgtgatctcaagatccacctttgctggccatggcaggtatgcaggccactggactggtgatgtgtggtcttcttgggagcaattggccagttctgttccagagatcctacagttcaacctgcttggagtaccactggtgggagcagatgtgtgtggcttcctgggcaacacctctgaggagctgtgtgttcggtggacccagctgggagccttttaccctttcatgagaaaccacaacagcctgctgagcctgccccaggagccttactcattctcagagccagcccagcaggccatgaggaaggccctgaccctaagatatgccctgctgcctcacctgtacaccttatttcaccaagcccatgtggctggggagacagtggccagacctctgttcctggaattcccaaaagactccagcacctggacagttgaccaccaactgctgtggggagaggccttgttgatcacccctgtgctgcaggctggcaaggctgaggtgactggctacttccctctgggaacatggtatgacctccagacagtgccagtggaagcactgggcagcctgccacctccacctgctgcccctagagaacctgccatccacagtgaaggacagtgggtgacactgcctgcccccctggacaccatcaatgtgcacctaagggctggctacatcatcccactgcagggccctggattaaccacaactgaatctagacagcaacctatggccctggctgtggccttaactaagggtggggaggccagaggagagctattttgggatgatggagaaagcctagaggtgctggaaaggggagcttacacacaggtgatcttcctggccaggaacaacaccattgtgaatgagctggtgcgggtgacctcagagggggctggcctgcagcttcaaaaggtgactgtcctgggagtggccacagcccctcagcaggtgctgagtaatggagtgccagtaagcaatttcacatacagccctgacaccaaggttctggacatctgtgtctcccttctcatgggggagcaattcctggtgagctggtgc

SEQ ID NO: 709 - protein, 29 aa, synthetic construct
  REGION 1..29: note = Synthetic
MHRPRRRGTRPPPLALLAALLLAARGADA

SEQ ID NO: 710 - DNA, 141 bp, synthetic construct
  misc_feature 1..141: note = Synthetic
  source 1..141: mol_type = other DNA
aggaacccctagtgatggagttggccactccctctctgcgcgctcgctcgctcactgaggccgggcgaccaaaggtcgcccgacgcccgggctttgcccgggcggcctcagtgagcgagcgagcgcgcagctgcctgcagg

SEQ ID NO: 711 - DNA, 130 bp, synthetic construct
  misc_feature 1..130: note = Synthetic
  source 1..130: mol_type = other DNA
aggaacccctagtgatggagttggccactccctctctgcgcgctcgctcgctcactgaggccgggcgaccaaaggtcgcccgacgcccgggctttgcccgggcggcctcagtgagcgagcgagcgcgcag

SEQ ID NO: 712 - DNA, 227 bp, synthetic construct
  misc_feature 1..227: note = Synthetic
  source 1..227: mol_type = other DNA
tcagccataccacatttgtagaggttttacttgctttaaaaaacctcccacacctccccctgaacctgaaacataaaatgaatgcaattgttgttgttaacttgtttattgcagcttataatggttacaaataaagcaatagcatcacaaatttcacaaataaagcatttttttcactgcattctagttgtggtttgtccaaactcatcaatgtatcttatcatgtc

SEQ ID NO: 713 - protein, 15 aa, synthetic construct
  REGION 1..15: note = Synthetic
GGGGSGGGGSGGGGS

SEQ ID NO: 714 - protein, 10 aa, synthetic construct
  REGION 1..10: note = Synthetic
GGGGSGGGGS

SEQ ID NO: 715 - DNA, 45 bp, synthetic construct
  misc_feature 1..45: note = Synthetic
  source 1..45: mol_type = other DNA
ggcggcggcggaagcggagggggaggatcaggaggaggcggatcc

SEQ ID NO: 716 - DNA, 45 bp, synthetic construct
  misc_feature 1..45: note = Synthetic
  source 1..45: mol_type = other DNA
ggtggtggtggaagtggtggtggtggcagtggtggtggtggatct

SEQ ID NO: 717 - DNA, 45 bp, synthetic construct
  misc_feature 1..45: note = Synthetic
  source 1..45: mol_type = other DNA
ggaggaggaggctctggaggaggaggctctggagggggaggctct

SEQ ID NO: 718 - DNA, 45 bp, synthetic construct
  misc_feature 1..45: note = Synthetic
  source 1..45: mol_type = other DNA
gggggtgggggctctggggggggaggcagtggaggaggtggctct

SEQ ID NO: 719 - DNA, 45 bp, synthetic construct
  misc_feature 1..45: note = Synthetic
  source 1..45: mol_type = other DNA
ggaggtgggggctcaggaggaggtggctctggaggaggaggctca

SEQ ID NO: 720 - DNA, 30 bp, synthetic construct
  misc_feature 1..30: note = Synthetic
  source 1..30: mol_type = other DNA
ggaggtggtggaagtggaggtggtggaagt

SEQ ID NO: 721 - DNA, 30 bp, synthetic construct
  misc_feature 1..30: note = Synthetic
  source 1..30: mol_type = other DNA
ggtggtggtggtagtggtggtggtggctct

SEQ ID NO: 722 - DNA, 30 bp, synthetic construct
  misc_feature 1..30: note = Synthetic
  source 1..30: mol_type = other DNA
ggtgggggtggctctgggggtggaggcagt

SEQ ID NO: 723 - DNA, 30 bp, synthetic construct
  misc_feature 1..30: note = Synthetic
  source 1..30: mol_type = other DNA
ggaggtggaggctctggaggaggtggcagt

SEQ ID NO: 724 - DNA, 30 bp, synthetic construct
  misc_feature 1..30: note = Synthetic
  source 1..30: mol_type = other DNA
ggtggtggtggcagtggtggtggtggttct

SEQ ID NO: 725 - DNA, 30 bp, synthetic construct
  misc_feature 1..30: note = Synthetic
  source 1..30: mol_type = other DNA
ggtggaggtggctcagggggaggaggcagt

SEQ ID NO: 726 - DNA, 30 bp, synthetic construct
  misc_feature 1..30: note = Synthetic
  source 1..30: mol_type = other DNA
gggggaggaggctcaggtgggggtggcagt

SEQ ID NO: 727 - DNA, 15 bp, synthetic construct
  misc_feature 1..15: note = Synthetic
  source 1..15: mol_type = other DNA
ggtggtggtggctct

SEQ ID NO: 728 - DNA, 4014 bp, synthetic construct
  misc_feature 1..4014: note = Synthetic
  misc_feature 1..130: note = 130 bp AAV2 ITR Left
  misc_feature 139..238: note = mAlb Splice Acceptor
  misc_feature 241..966: note = 12843 Anti-TfR scFv
  misc_feature 967..996: note = Linker
  misc_feature 997..3645: note = Alpha-glucosidase (70-952)
  misc_feature 3652..3878: note = SV40 PolyA
  misc_feature 3885..4014: note = 130 bp AAV2 ITR Right
  source 1..4014: mol_type = other DNA
ctgcgcgctcgctcgctcactgaggccgcccgggcaaagcccgggcgtcgggcgacctttggtcgcccggcctcagtgagcgagcgagcgcgcagagagggagtggccaactccatcactaggggttcctagatctcttaggtcagtgaagagaagaacaaaaagcagcatattacagttagttgtcttcatcaatctttaaatatgttgtgtggtttttctctccctgtttccacagttgacatccagatgacccagtctccatcctccctgtctgcatctgtaggagacagagtcaccatcacttgccgggcaagtcagagcattagcagctatttaaattggtatcagcagaaaccagggaaagcccctaagctcctgatctatgctgcatccagtttgcaaagtggggtcccgtcaaggttcagtggcagtggatctgggacagatttcactctcaccatcagcagtctgcaacctgaagattttgcaacttactactgtcaacagagttacagtacccctccgatcaccttcggccaagggacacgactggagattaaaggcggcggcggaagcggagggggaggatcaggaggaggcggatccgaggtgcagctggtggagtctgggggaggcttagtacagcctggagggtccctaagactctcctgtgcagcctctggattcaccttcaatatttttgaaatgaactgggtccgccaggctccagggaaggggctggagtggatttcctacattagtagtcgtggaactaccacatactacgcagactctgtgaggggccgattcaccatctccagagacaacgccaagaactcactgtatctgcaaatgaacagcctgagagccgaggacacggctgtttattactgtgcgagagattatgaagcaacaatcccttttgacttctggggccagggaaccctggtcaccgtctcctcaggaggtggtggaagtggaggtggtggaagtgcacaccccggccgtcccagagcagtgcccacacagtgcgacgtcccccccaacagccgcttcgattgcgcccctgacaaggccatcacccaggaacagtgcgaggcccgcggctgttgctacatccctgcaaagcaggggctgcagggagcccagatggggcagccctggtgcttcttcccacccagctaccccagctacaagctggagaacctgagctcctctgaaatgggctacacggccaccctgacccgtaccacccccaccttcttccccaaggacatcctgaccctgcggctggacgtgatgatggagactgagaaccgcctccacttcacgatcaaagatccagctaacaggcgctacgaggtgcccttggagaccccgcatgtccacagccgggcaccgtccccactctacagcgtggagttctccgaggagcccttcggggtgatcgtgcgccggcagctggacggccgcgtgctgctgaacacgacggtggcgcccctgttctttgcggaccagttccttcagctgtccacctcgctgccctcgcagtatatcacaggcctcgccgagcacctcagtcccctgatgctcagcaccagctggaccaggatcaccctgtggaaccgggaccttgcgcccacgcccggtgcgaacctctacgggtctcaccctttctacctggcgctggaggacggcgggtcggcacacggggtgttcctgctaaacagcaatgccatggatgtggtcctgcagccgagccctgcccttagctggaggtcgacaggtgggatcctggatgtctacatcttcctgggcccagagcccaagagcgtggtgcagcagtacctggacgttgtgggatacccgttcatgccgccatactggggcctgggcttccacctgtgccgctggggctactcctccaccgctatcacccgccaggtggtggagaacatgaccagggcccacttccccctggacgtccagtggaacgacctggactacatggactcccggagggacttcacgttcaacaaggatggcttccgggacttcccggccatggtgcaggagctgcaccagggcggccggcgctacatgatgatcgtggatcctgccatcagcagctcgggccctgccgggagctacaggccctacgacgagggtctgcggaggggggttttcatcaccaacgagaccggccagccgctgattgggaaggtatggcccgggtccactgccttccccgacttcaccaaccccacagccctggcctggtgggaggacatggtggctgagttccatgaccaggtgcccttcgacggcatgtggattgacatgaacgagccttccaacttcatcaggggctctgaggacggctgccccaacaatgagctggagaacccaccctacgtgcctggggtggttggggggaccctccaggcggccaccatctgtgcctccagccaccagtttctctccacacactacaacctgcacaacctctacggcctgaccgaagccatcgcctcccacagggcgctggtgaaggctcgggggacacgcccatttgtgatctcccgctcgacctttgctggccacggccgatacgccggccactggacgggggacgtgtggagctcctgggagcagctcgcctcctccgtgccagaaatcctgcagtttaacctgctgggggtgcctctggtcggggccgacgtctgcggcttcctgggcaacacctcagaggagctgtgtgtgcgctggacccagctgggggccttctaccccttcatgcggaaccacaacagcctgctcagtctgccccaggagccgtacagcttcagcgagccggcccagcaggccatgaggaaggccctcaccctgcgctacgcactcctcccccacctctacacactgttccaccaggcccacgtcgcgggggagaccgtggcccggcccctcttcctggagttccccaaggactctagcacctggactgtggaccaccagctcctgtggggggaggccctgctcatcaccccagtgctccaggccgggaaggccgaagtgactggctacttccccttgggcacatggtacgacctgcagacggtgccagtagaggcccttggcagcctcccacccccacctgcagctccccgtgagccagccatccacagcgaggggcagtgggtgacgctgccggcccccctggacaccatcaacgtccacctccgggctgggtacatcatccccctgcagggccctggcctcacaaccacagagtcccgccagcagcccatggccctggctgtggccctgaccaagggtggggaggcccgaggggagctgttctgggacgatggagagagcctggaagtgctggagcgaggggcctacacacaggtcatcttcctggccaggaataacacgatcgtgaatgagctggtacgtgtgaccagtgagggagctggcctgcagctgcagaaggtgactgtcctgggcgtggccacggcgccccagcaggtcctctccaacggtgtccctgtctccaacttcacctacagccccgacaccaaggtcctggacatctgtgtctcgctgttgatgggagagcagtttctcgtcagctggtgttaataatcagccataccacatttgtagaggttttacttgctttaaaaaacctcccacacctccccctgaacctgaaacataaaatgaatgcaattgttgttgttaacttgtttattgcagcttataatggttacaaataaagcaatagcatcacaaatttcacaaataaagcatttttttcactgcattctagttgtggtttgtccaaactcatcaatgtatcttatcatgtcagatctaggaacccctagtgatggagttggccactccctctctgcgcgctcgctcgctcactgaggccgggcgaccaaaggtcgcccgacgcccgggctttgcccgggcggcctcagtgagcgagcgagcgcgcag

SEQ ID NO: 729 - DNA, 4014 bp, synthetic construct
  misc_feature 1..4014: note = Synthetic
  misc_feature 1..130: note = 130 bp AAV2 ITR Left
  misc_feature 139..238: note = mAlb Splice Acceptor
  misc_feature 241..966: note = 12843 Anti-TfR scFv
  misc_feature 967..996: note = Linker
  misc_feature 997..3645: note = Alpha-glucosidase (70-952)
  misc_feature 3652..3878: note = SV40 PolyA
  misc_feature 3885..4014: note = 130 bp AAV2 ITR Right
  source 1..4014: mol_type = other DNA
ctgcgcgctcgctcgctcactgaggccgcccgggcaaagcccgggcgtcgggcgacctttggtcgcccggcctcagtgagcgagcgagcgcgcagagagggagtggccaactccatcactaggggttcctagatctcttaggtcagtgaagagaagaacaaaaagcagcatattacagttagttgtcttcatcaatctttaaatatgttgtgtggtttttctctccctgtttccacagttgacatccagatgacacagagcccctctagcctgtctgcctctgtgggagacagagtgaccatcacctgtagagccagccagagcatcagcagctacctgaactggtatcagcagaagcctggcaaggcccctaaactgctgatctatgctgccagcagcctgcagtctggggtgccctctagattttctggcagtggctctggcacagacttcaccctgaccataagctccctgcagcctgaggactttgccacctactactgtcagcagagctacagcacccctcctatcacctttggccagggcaccagactggaaatcaaaggtggtggtggaagtggtggtggtggcagtggtggtggtggatctgaagtgcagctggtggaaagtggtggtggcctggttcagcctggtggctctctgagactgagctgtgcagcctctggcttcaccttcaacatctttgagatgaactgggtcagacaggccccaggcaaaggcctggaatggatcagctacatcagctccagaggcaccacaacctactatgctgactctgtcagaggcaggttcaccatcagcagagacaatgccaagaacagcctgtacctgcagatgaactccctgagagctgaggacacagcagtgtactactgtgccagggactatgaggctacaatcccctttgacttctggggccagggaaccctggtcacagttagcagtggtggtggtggtagtggtggtggtggctctgcccatcctggcagacctagagctgtgcccacacagtgtgatgtgcctccaaacagcagatttgactgtgcccctgacaaggccatcacacaagagcagtgtgaagccagaggctgctgttacatccctgccaagcaaggactgcaaggggctcagatgggacagccctggtgcttcttcccaccatcttaccccagctacaagctggaaaacctgagcagctctgagatgggctacactgctacactgaccagaaccacacctacattcttcccaaaggacatcctgacactgaggctggatgtgatgatggaaacagagaacaggctgcacttcaccatcaaggaccctgccaatagaagatatgaggtgcccctggaaacccctcatgtgcactctagagccccatctccactgtactctgtggaattttctgaggaaccctttggggtcatagtcagaaggcagctggatggcagagtgctgctgaacacaactgtggcccctctgttctttgctgatcagttcctgcagctgagcaccagcctgcctagccagtatatcacaggcctggcagagcacctgtctccactgatgctgagcacatcctggaccagaatcaccctgtggaacagagacctggctcccacacctggggccaacctgtatggctctcaccccttctatctggccctggaagatggtggttcagcccatggtgtctttctgctgaactccaatgccatggatgtggtgctgcagccctctcctgctctgtcttggagaagcactggtggcatcctggatgtgtacatctttctgggccctgagcctaagtctgtggtgcagcagtacctggatgttgtgggctaccccttcatgcctccttattggggcctgggcttccacctgtgcagatggggatacagcagcacagccatcaccagacaggttgtggaaaacatgaccagagcacacttcccactggatgtgcagtggaatgacctggactacatggacagcagaagggacttcaccttcaacaaggatggcttcagagacttccctgccatggtgcaagagctgcaccaaggtggtagaagatatatgatgattgtggacccagccatcagctcctctggaccagctggcagctacagaccctatgatgagggactgagaagaggggtgttcatcaccaatgagacaggccagcctctgattggcaaagtgtggccaggctccacagcctttccagatttcacaaaccccacagctctggcttggtgggaagatatggtggcagagttccatgatcaggtgccctttgatggcatgtggattgacatgaatgagcccagcaacttcatcaggggctctgaggatggatgccccaacaatgaactggaaaatcctccttatgtgcctggtgttgttggagggacactgcaggcagccacaatttgtgccagctctcaccagtttctgagcacccactacaacctgcacaatctgtatggcctgactgaggccattgccagccacagggctcttgtgaaggctagaggcaccagaccttttgtgatcagcaggtccacctttgctggccatggcagatatgctggccactggactggggatgtgtggtctagttgggagcagctggctagctctgtgcctgagatcctgcagttcaacctgctgggagtgccccttgttggagcagatgtgtgtggcttcctgggcaacacctcagaggaactgtgtgtcagatggactcagctgggagcattctaccctttcatgagaaaccacaacagcctgctgagcctgcctcaagagccttacagcttttctgagccagcacagcaggccatgagaaaggccctgactctgagatatgccctgctgcctcacctgtacaccctgttccatcaggctcatgtggctggggagactgtggctagacccctgttcctggaattccccaaggacagctccacctggacagtggatcatcagctgctgtggggagaagccctgctgattacacctgtgctgcaggctggcaaggctgaagtgacaggctacttccctcttggcacttggtatgacctgcagacagtgcctgtggaagctctgggatctctgcctccacctcctgctgctcctagagagcctgccattcactctgaaggccagtgggttaccctgcctgctccactggataccatcaatgtgcatctgagagcaggctacatcatccctctgcaaggccctggcctgaccaccacagaatctagacagcagccaatggcactggctgtggccctgaccaaaggtggagaagctagaggggagctgttctgggatgatggggagagcctggaagtgctggaaagaggggcctatacacaagtgatttttctggctaggaacaataccattgtgaatgagcttgtcagagtcacctctgaaggtgctggcctgcagctccagaaagtgacagtgcttggagtggccacagcaccccagcaagtgctgtctaatggggtgccagtgtccaacttcacatacagccctgataccaaggtcctggacatctgtgtgtccctgcttatgggagagcagttcctggtgtcttggtgctaataatcagccataccacatttgtagaggttttacttgctttaaaaaacctcccacacctccccctgaacctgaaacataaaatgaatgcaattgttgttgttaacttgtttattgcagcttataatggttacaaataaagcaatagcatcacaaatttcacaaataaagcatttttttcactgcattctagttgtggtttgtccaaactcatcaatgtatcttatcatgtcagatctaggaacccctagtgatggagttggccactccctctctgcgcgctcgctcgctcactgaggccgggcgaccaaaggtcgcccgacgcccgggctttgcccgggcggcctcagtgagcgagcgagcgcgcag

SEQ ID NO: 730 - DNA, 4014 bp, synthetic construct
  misc_feature 1..4014: note = Synthetic
  misc_feature 1..130: note = 130 bp AAV2 ITR Left
  misc_feature 139..238: note = mAlb Splice Acceptor
  misc_feature 241..966: note = 12843 Anti-TfR scFv
  misc_feature 967..996: note = Linker
  misc_feature 997..3645: note = Alpha-glucosidase (70-952)
  misc_feature 3652..3878: note = SV40 PolyA
  misc_feature 3885..4014: note = 130 bp AAV2 ITR Right
  source 1..4014: mol_type = other DNA
ctgcgcgctcgctcgctcactgaggccgcccgggcaaagcccgggcgtcgggcgacctttggtcgcccggcctcagtgagcgagcgagcgcgcagagagggagtggccaactccatcactaggggttcctagatctcttaggtcagtgaagagaagaacaaaaagcagcatattacagttagttgtcttcatcaatctttaaatatgttgtgtggtttttctctccctgtttccacagttgacatccagatgacccagagccccagcagcctgtctgcctctgtgggtgacagggtgaccattacctgcagagccagccaaagcatcagcagctacctgaactggtaccagcagaagccaggcaaggcccctaagctgctgatctatgctgccagcagcctgcaatctggagtgcctagcagattcagtggctctggctcaggcacagacttcaccctgaccatctccagcctccagcctgaggattttgccacctactactgccagcagagctacagcaccccccctatcacctttggccagggcaccagactggaaatcaagggaggaggaggctctggaggaggaggctctggagggggaggctctgaggtgcagctggtggagtctgggggaggcctggtgcagcctggaggctccctgaggctgagctgtgctgcctcaggcttcaccttcaacatctttgaaatgaactgggtcagacaggcccctggcaaaggcctggaatggatcagctacatcagcagcagaggcacaacaacatactatgctgactctgtgagaggcaggttcacaatcagcagagacaatgccaagaacagcctgtacctgcagatgaacagcctgagagcagaggatacagctgtgtactactgtgccagagactatgaggccaccatcccctttgatttctggggccagggcaccctggttacagtgtccagtggtgggggtggctctgggggtggaggcagtgcccatcctggcagacctagagctgtgcccacacagtgtgatgtgcctccaaacagcagatttgactgtgcccctgacaaggccatcacacaagagcagtgtgaagccagaggctgctgttacatccctgccaagcaaggactgcaaggggctcagatgggacagccctggtgcttcttcccaccatcttaccccagctacaagctggaaaacctgagcagctctgagatgggctacactgctacactgaccagaaccacacctacattcttcccaaaggacatcctgacactgaggctggatgtgatgatggaaacagagaacaggctgcacttcaccatcaaggaccctgccaatagaagatatgaggtgcccctggaaacccctcatgtgcactctagagccccatctccactgtactctgtggaattttctgaggaaccctttggggtcatagtcagaaggcagctggatggcagagtgctgctgaacacaactgtggcccctctgttctttgctgatcagttcctgcagctgagcaccagcctgcctagccagtatatcacaggcctggcagagcacctgtctccactgatgctgagcacatcctggaccagaatcaccctgtggaacagagacctggctcccacacctggggccaacctgtatggctctcaccccttctatctggccctggaagatggtggttcagcccatggtgtctttctgctgaactccaatgccatggatgtggtgctgcagccctctcctgctctgtcttggagaagcactggtggcatcctggatgtgtacatctttctgggccctgagcctaagtctgtggtgcagcagtacctggatgttgtgggctaccccttcatgcctccttattggggcctgggcttccacctgtgcagatggggatacagcagcacagccatcaccagacaggttgtggaaaacatgaccagagcacacttcccactggatgtgcagtggaatgacctggactacatggacagcagaagggacttcaccttcaacaaggatggcttcagagacttccctgccatggtgcaagagctgcaccaaggtggtagaagatatatgatgattgtggacccagccatcagctcctctggaccagctggcagctacagaccctatgatgagggactgagaagaggggtgttcatcaccaatgagacaggccagcctctgattggcaaagtgtggccaggctccacagcctttccagatttcacaaaccccacagctctggcttggtgggaagatatggtggcagagttccatgatcaggtgccctttgatggcatgtggattgacatgaatgagcccagcaacttcatcaggggctctgaggatggatgccccaacaatgaactggaaaatcctccttatgtgcctggtgttgttggagggacactgcaggcagccacaatttgtgccagctctcaccagtttctgagcacccactacaacctgcacaatctgtatggcctgactgaggccattgccagccacagggctcttgtgaaggctagaggcaccagaccttttgtgatcagcaggtccacctttgctggccatggcagatatgctggccactggactggggatgtgtggtctagttgggagcagctggctagctctgtgcctgagatcctgcagttcaacctgctgggagtgccccttgttggagcagatgtgtgtggcttcctgggcaacacctcagaggaactgtgtgtcagatggactcagctgggagcattctaccctttcatgagaaaccacaacagcctgctgagcctgcctcaagagccttacagcttttctgagccagcacagcaggccatgagaaaggccctgactctgagatatgccctgctgcctcacctgtacaccctgttccatcaggctcatgtggctggggagactgtggctagacccctgttcctggaattccccaaggacagctccacctggacagtggatcatcagctgctgtggggagaagccctgctgattacacctgtgctgcaggctggcaaggctgaagtgacaggctacttccctcttggcacttggtatgacctgcagacagtgcctgtggaagctctgggatctctgcctccacctcctgctgctcctagagagcctgccattcactctgaaggccagtgggttaccctgcctgctccactggataccatcaatgtgcatctgagagcaggctacatcatccctctgcaaggccctggcctgaccaccacagaatctagacagcagccaatggcactggctgtggccctgaccaaaggtggagaagctagaggggagctgttctgggatgatggggagagcctggaagtgctggaaagaggggcctatacacaagtgatttttctggctaggaacaataccattgtgaatgagcttgtcagagtcacctctgaaggtgctggcctgcagctccagaaagtgacagtgcttggagtggccacagcaccccagcaagtgctgtctaatggggtgccagtgtccaacttcacatacagccctgataccaaggtcctggacatctgtgtgtccctgcttatgggagagcagttcctggtgtcttggtgctaataatcagccataccacatttgtagaggttttacttgctttaaaaaacctcccacacctccccctgaacctgaaacataaaatgaatgcaattgttgttgttaacttgtttattgcagcttataatggttacaaataaagcaatagcatcacaaatttcacaaataaagcatttttttcactgcattctagttgtggtttgtccaaactcatcaatgtatcttatcatgtcagatctaggaacccctagtgatggagttggccactccctctctgcgcgctcgctcgctcactgaggccgggcgaccaaaggtcgcccgacgcccgggctttgcccgggcggcctcagtgagcgagcgagcgcgcag

SEQ ID NO: 731 - DNA, 4014 bp, synthetic construct
  misc_feature 1..4014: note = Synthetic
  misc_feature 1..130: note = 130 bp AAV2 ITR Left
  misc_feature 139..238: note = mAlb Splice Acceptor
  misc_feature 241..966: note = 12843 Anti-TfR scFv
  misc_feature 967..996: note = Linker
  misc_feature 997..3645: note = Alpha-glucosidase (70-952)
  misc_feature 3652..3878: note = SV40 PolyA
  misc_feature 3885..4014: note = 130 bp AAV2 ITR Right
  source 1..4014: mol_type = other DNA
ctgcgcgctcgctcgctcactgaggccgcccgggcaaagcccgggcgtcgggcgacctttggtcgcccggcctcagtgagcgagcgagcgcgcagagagggagtggccaactccatcactaggggttcctagatctcttaggtcagtgaagagaagaacaaaaagcagcatattacagttagttgtcttcatcaatctttaaatatgttgtgtggtttttctctccctgtttccacagttgatatccaaatgacccagagccccagctccctgtcagcctctgtgggagacagagtgaccatcacatgcagagccagccagagcatcagcagctacctgaactggtaccagcagaagcctggcaaggcccccaagctgctgatctatgctgccagcagcctgcagtctggagtgccttccagattctctggctcaggcagtggcacagacttcaccctgacaatcagcagcctgcagcctgaagactttgccacctactactgccagcagagctacagcacaccacctatcacctttggccagggcaccagactggagatcaaagggggtgggggctctggggggggaggcagtggaggaggtggctctgaagtccagctggtggagtctggaggaggcctggtgcagcctggaggcagcctgaggctgtcctgtgcagcctctggcttcaccttcaacatctttgagatgaactgggttaggcaggcccctggcaagggcctggaatggatcagctacattagcagcagaggcaccacaacctactatgctgactctgtgaggggcagattcaccatcagcagagataatgccaagaacagcctgtacctgcagatgaacagcctcagagctgaggacacagctgtgtactactgtgccagagattatgaggccaccatcccctttgacttctggggccaaggcaccctggtgacagtgtcttctggaggtggaggctctggaggaggtggcagtgcccatcctggcagacctagagctgtgcccacacagtgtgatgtgcctccaaacagcagatttgactgtgcccctgacaaggccatcacacaagagcagtgtgaagccagaggctgctgttacatccctgccaagcaaggactgcaaggggctcagatgggacagccctggtgcttcttcccaccatcttaccccagctacaagctggaaaacctgagcagctctgagatgggctacactgctacactgaccagaaccacacctacattcttcccaaaggacatcctgacactgaggctggatgtgatgatggaaacagagaacaggctgcacttcaccatcaaggaccctgccaatagaagatatgaggtgcccctggaaacccctcatgtgcactctagagccccatctccactgtactctgtggaattttctgaggaaccctttggggtcatagtcagaaggcagctggatggcagagtgctgctgaacacaactgtggcccctctgttctttgctgatcagttcctgcagctgagcaccagcctgcctagccagtatatcacaggcctggcagagcacctgtctccactgatgctgagcacatcctggaccagaatcaccctgtggaacagagacctggctcccacacctggggccaacctgtatggctctcaccccttctatctggccctggaagatggtggttcagcccatggtgtctttctgctgaactccaatgccatggatgtggtgctgcagccctctcctgctctgtcttggagaagcactggtggcatcctggatgtgtacatctttctgggccctgagcctaagtctgtggtgcagcagtacctggatgttgtgggctaccccttcatgcctccttattggggcctgggcttccacctgtgcagatggggatacagcagcacagccatcaccagacaggttgtggaaaacatgaccagagcacacttcccactggatgtgcagtggaatgacctggactacatggacagcagaagggacttcaccttcaacaaggatggcttcagagacttccctgccatggtgcaagagctgcaccaaggtggtagaagatatatgatgattgtggacccagccatcagctcctctggaccagctggcagctacagaccctatgatgagggactgagaagaggggtgttcatcaccaatgagacaggccagcctctgattggcaaagtgtggccaggctccacagcctttccagatttcacaaaccccacagctctggcttggtgggaagatatggtggcagagttccatgatcaggtgccctttgatggcatgtggattgacatgaatgagcccagcaacttcatcaggggctctgaggatggatgccccaacaatgaactggaaaatcctccttatgtgcctggtgttgttggagggacactgcaggcagccacaatttgtgccagctctcaccagtttctgagcacccactacaacctgcacaatctgtatggcctgactgaggccattgccagccacagggctcttgtgaaggctagaggcaccagaccttttgtgatcagcaggtccacctttgctggccatggcagatatgctggccactggactggggatgtgtggtctagttgggagcagctggctagctctgtgcctgagatcctgcagttcaacctgctgggagtgccccttgttggagcagatgtgtgtggcttcctgggcaacacctcagaggaactgtgtgtcagatggactcagctgggagcattctaccctttcatgagaaaccacaacagcctgctgagcctgcctcaagagccttacagcttttctgagccagcacagcaggccatgagaaaggccctgactctgagatatgccctgctgcctcacctgtacaccctgttccatcaggctcatgtggctggggagactgtggctagacccctgttcctggaattccccaaggacagctccacctggacagtggatcatcagctgctgtggggagaagccctgctgattacacctgtgctgcaggctggcaaggctgaagtgacaggctacttccctcttggcacttggtatgacctgcagacagtgcctgtggaagctctgggatctctgcctccacctcctgctgctcctagagagcctgccattcactctgaaggccagtgggttaccctgcctgctccactggataccatcaatgtgcatctgagagcaggctacatcatccctctgcaaggccctggcctgaccaccacagaatctagacagcagccaatggcactggctgtggccctgaccaaaggtggagaagctagaggggagctgttctgggatgatggggagagcctggaagtgctggaaagaggggcctatacacaagtgatttttctggctaggaacaataccattgtgaatgagcttgtcagagtcacctctgaaggtgctggcctgcagctccagaaagtgacagtgcttggagtggccacagcaccccagcaagtgctgtctaatggggtgccagtgtccaacttcacatacagccctgataccaaggtcctggacatctgtgtgtccctgcttatgggagagcagttcctggtgtcttggtgctaataatcagccataccacatttgtagaggttttacttgctttaaaaaacctcccacacctccccctgaacctgaaacataaaatgaatgcaattgttgttgttaacttgtttattgcagcttataatggttacaaataaagcaatagcatcacaaatttcacaaataaagcatttttttcactgcattctagttgtggtttgtccaaactcatcaatgtatcttatcatgtcagatctaggaacccctagtgatggagttggccactccctctctgcgcgctcgctcgctcactgaggccgggcgaccaaaggtcgcccgacgcccgggctttgcccgggcggcctcagtgagcgagcgagcgcgcag

SEQ ID NO: 732 - DNA, 4020 bp, synthetic construct
  misc_feature 1..4020: note = Synthetic
  misc_feature 1..130: note = 130 bp AAV2 ITR Left
  misc_feature 139..238: note = mAlb Splice Acceptor
  misc_feature 241..972: note = 12843 Anti-TfR scFv
  misc_feature 973..1002: note = Linker
  misc_feature 1003..3651: note = Alpha-glucosidase (70-952)
  misc_feature 3658..3884: note = SV40 PolyA
  misc_feature 3891..4020: note = 130 bp AAV2 ITR Right
  source 1..4020: mol_type = other DNA
ctgcgcgctcgctcgctcactgaggccgcccgggcaaagcccgggcgtcgggcgacctttggtcgcccggcctcagtgagcgagcgagcgcgcagagagggagtggccaactccatcactaggggttcctagatctcttaggtcagtgaagagaagaacaaaaagcagcatattacagttagttgtcttcatcaatctttaaatatgttgtgtggtttttctctccctgtttccacagttgacatccagatgacccagtctccatcctccctgtctgcatctgtaggagacagagtcaccatcacttgccgggcaagtcagagcattagcagctatttaaattggtatcagcagaaaccagggaaagcccctaagctcctgatctatgctgcatccagtttgcaaagtggggtcccgtcaaggttcagtggcagtggatctgggacagatttcactctcaccatcagcagtctgcaacctgaagattttgcaacttactactgtcaacagagttacagtacccctccgatcaccttcggccaagggacacgactggagattaaaggcggcggcggaagcggagggggaggatcaggaggaggcggatccgaagtgcagctggtggagtctgggggaggcttggttcagcctggcaggtccctgagactctcctgtgcagcctctggattcacctttgatgattatgccatgaactgggtccggcaagctccagggaagggcctggagtgggtctcaggtattagttggagtagtggtagcatggactatgcggactctgtgaagggccgattcaccatctccagagacaacgccaaaaactccctgtatctgcaaatgaacagtctgagaactgaggacacggccttatattactgtgcaaaagctagggaagttggagactactacggtatggacgtctggggccaagggaccacggtcaccgtctcctcaggaggtggtggaagtggaggtggtggaagtgcacaccccggccgtcccagagcagtgcccacacagtgcgacgtcccccccaacagccgcttcgattgcgcccctgacaaggccatcacccaggaacagtgcgaggcccgcggctgttgctacatccctgcaaagcaggggctgcagggagcccagatggggcagccctggtgcttcttcccacccagctaccccagctacaagctggagaacctgagctcctctgaaatgggctacacggccaccctgacccgtaccacccccaccttcttccccaaggacatcctgaccctgcggctggacgtgatgatggagactgagaaccgcctccacttcacgatcaaagatccagctaacaggcgctacgaggtgcccttggagaccccgcatgtccacagccgggcaccgtccccactctacagcgtggagttctccgaggagcccttcggggtgatcgtgcgccggcagctggacggccgcgtgctgctgaacacgacggtggcgcccctgttctttgcggaccagttccttcagctgtccacctcgctgccctcgcagtatatcacaggcctcgccgagcacctcagtcccctgatgctcagcaccagctggaccaggatcaccctgtggaaccgggaccttgcgcccacgcccggtgcgaacctctacgggtctcaccctttctacctggcgctggaggacggcgggtcggcacacggggtgttcctgctaaacagcaatgccatggatgtggtcctgcagccgagccctgcccttagctggaggtcgacaggtgggatcctggatgtctacatcttcctgggcccagagcccaagagcgtggtgcagcagtacctggacgttgtgggatacccgttcatgccgccatactggggcctgggcttccacctgtgccgctggggctactcctccaccgctatcacccgccaggtggtggagaacatgaccagggcccacttccccctggacgtccagtggaacgacctggactacatggactcccggagggacttcacgttcaacaaggatggcttccgggacttcccggccatggtgcaggagctgcaccagggcggccggcgctacatgatgatcgtggatcctgccatcagcagctcgggccctgccgggagctacaggccctacgacgagggtctgcggaggggggttttcatcaccaacgagaccggccagccgctgattgggaaggtatggcccgggtccactgccttccccgacttcaccaaccccacagccctggcctggtgggaggacatggtggctgagttccatgaccaggtgcccttcgacggcatgtggattgacatgaacgagccttccaacttcatcaggggctctgaggacggctgccccaacaatgagctggagaacccaccctacgtgcctggggtggttggggggaccctccaggcggccaccatctgtgcctccagccaccagtttctctccacacactacaacctgcacaacctctacggcctgaccgaagccatcgcctcccacagggcgctggtgaaggctcgggggacacgcccatttgtgatctcccgctcgacctttgctggccacggccgatacgccggccactggacgggggacgtgtggagctcctgggagcagctcgcctcctccgtgccagaaatcctgcagtttaacctgctgggggtgcctctggtcggggccgacgtctgcggcttcctgggcaacacctcagaggagctgtgtgtgcgctggacccagctgggggccttctaccccttcatgcggaaccacaacagcctgctcagtctgccccaggagccgtacagcttcagcgagccggcccagcaggccatgaggaaggccctcaccctgcgctacgcactcctcccccacctctacacactgttccaccaggcccacgtcgcgggggagaccgtggcccggcccctcttcctggagttccccaaggactctagcacctggactgtggaccaccagctcctgtggggggaggccctgctcatcaccccagtgctccaggccgggaaggccgaagtgactggctacttccccttgggcacatggtacgacctgcagacggtgccagtagaggcccttggcagcctcccacccccacctgcagctccccgtgagccagccatccacagcgaggggcagtgggtgacgctgccggcccccctggacaccatcaacgtccacctccgggctgggtacatcatccccctgcagggccctggcctcacaaccacagagtcccgccagcagcccatggccctggctgtggccctgaccaagggtggggaggcccgaggggagctgttctgggacgatggagagagcctggaagtgctggagcgaggggcctacacacaggtcatcttcctggccaggaataacacgatcgtgaatgagctggtacgtgtgaccagtgagggagctggcctgcagctgcagaaggtgactgtcctgggcgtggccacggcgccccagcaggtcctctccaacggtgtccctgtctccaacttcacctacagccccgacaccaaggtcctggacatctgtgtctcgctgttgatgggagagcagtttctcgtcagctggtgttaataatcagccataccacatttgtagaggttttacttgctttaaaaaacctcccacacctccccctgaacctgaaacataaaatgaatgcaattgttgttgttaacttgtttattgcagcttataatggttacaaataaagcaatagcatcacaaatttcacaaataaagcatttttttcactgcattctagttgtggtttgtccaaactcatcaatgtatcttatcatgtcagatctaggaacccctagtgatggagttggccactccctctctgcgcgctcgctcgctcactgaggccgggcgaccaaaggtcgcccgacgcccgggctttgcccgggcggcctcagtgagcgagcgagcgcgcag

SEQ ID NO: 733 - DNA, 4020 bp, synthetic construct
  misc_feature 1..4020: note = Synthetic
  misc_feature 1..130: note = 130 bp AAV2 ITR Left
  misc_feature 139..238: note = mAlb Splice Acceptor
  misc_feature 241..972: note = 12843 Anti-TfR scFv
  misc_feature 973..1002: note = Linker
  misc_feature 1003..3651: note = Alpha-glucosidase (70-952)
  misc_feature 3658..3884: note = SV40 PolyA
  misc_feature 3891..4020: note = 130 bp AAV2 ITR Right
  source 1..4020: mol_type = other DNA
ctgcgcgctcgctcgctcactgaggccgcccgggcaaagcccgggcgtcgggcgacctttggtcgcccggcctcagtgagcgagcgagcgcgcagagagggagtggccaactccatcactaggggttcctagatctcttaggtcagtgaagagaagaacaaaaagcagcatattacagttagttgtcttcatcaatctttaaatatgttgtgtggtttttctctccctgtttccacagttgacatccagatgacacagagcccctctagcctgtctgcctctgtgggagacagagtgaccatcacctgtagagccagccagagcatcagcagctacctgaactggtatcagcagaagcctggcaaggcccctaaactgctgatctatgctgccagcagcctgcagtctggggtgccctctagattttctggcagtggctctggcacagacttcaccctgaccataagctccctgcagcctgaggactttgccacctactactgtcagcagagctacagcacccctcctatcacctttggccagggcaccagactggaaatcaaaggtggtggtggaagtggtggtggtggcagtggtggtggtggatctgaagtgcagctggtggaaagtggtggtggcctggttcagcctggcagatccctgagactgagctgtgcagcctctggctttacctttgatgactatgccatgaactgggtcagacaggccccaggcaaaggcctggaatgggtgtcaggcatctcttggtcctctggctccatggactatgctgactctgtgaagggcagattcaccatcagcagagacaatgccaagaacagcctgtacctgcagatgaactccctgagaacagaggacacagccctgtactactgtgccaaggccagagaagtgggagactactatggcatggatgtgtggggccagggaaccacagtgacagtcagtagtggtggtggtggcagtggtggtggtggttctgcccatcctggcagacctagagctgtgcccacacagtgtgatgtgcctccaaacagcagatttgactgtgcccctgacaaggccatcacacaagagcagtgtgaagccagaggctgctgttacatccctgccaagcaaggactgcaaggggctcagatgggacagccctggtgcttcttcccaccatcttaccccagctacaagctggaaaacctgagcagctctgagatgggctacactgctacactgaccagaaccacacctacattcttcccaaaggacatcctgacactgaggctggatgtgatgatggaaacagagaacaggctgcacttcaccatcaaggaccctgccaatagaagatatgaggtgcccctggaaacccctcatgtgcactctagagccccatctccactgtactctgtggaattttctgaggaaccctttggggtcatagtcagaaggcagctggatggcagagtgctgctgaacacaactgtggcccctctgttctttgctgatcagttcctgcagctgagcaccagcctgcctagccagtatatcacaggcctggcagagcacctgtctccactgatgctgagcacatcctggaccagaatcaccctgtggaacagagacctggctcccacacctggggccaacctgtatggctctcaccccttctatctggccctggaagatggtggttcagcccatggtgtctttctgctgaactccaatgccatggatgtggtgctgcagccctctcctgctctgtcttggagaagcactggtggcatcctggatgtgtacatctttctgggccctgagcctaagtctgtggtgcagcagtacctggatgttgtgggctaccccttcatgcctccttattggggcctgggcttccacctgtgcagatggggatacagcagcacagccatcaccagacaggttgtggaaaacatgaccagagcacacttcccactggatgtgcagtggaatgacctggactacatggacagcagaagggacttcaccttcaacaaggatggcttcagagacttccctgccatggtgcaagagctgcaccaaggtggtagaagatatatgatgattgtggacccagccatcagctcctctggaccagctggcagctacagaccctatgatgagggactgagaagaggggtgttcatcaccaatgagacaggccagcctctgattggcaaagtgtggccaggctccacagcctttccagatttcacaaaccccacagctctggcttggtgggaagatatggtggcagagttccatgatcaggtgccctttgatggcatgtggattgacatgaatgagcccagcaacttcatcaggggctctgaggatggatgccccaacaatgaactggaaaatcctccttatgtgcctggtgttgttggagggacactgcaggcagccacaatttgtgccagctctcaccagtttctgagcacccactacaacctgcacaatctgtatggcctgactgaggccattgccagccacagggctcttgtgaaggctagaggcaccagaccttttgtgatcagcaggtccacctttgctggccatggcagatatgctggccactggactggggatgtgtggtctagttgggagcagctggctagctctgtgcctgagatcctgcagttcaacctgctgggagtgccccttgttggagcagatgtgtgtggcttcctgggcaacacctcagaggaactgtgtgtcagatggactcagctgggagcattctaccctttcatgagaaaccacaacagcctgctgagcctgcctcaagagccttacagcttttctgagccagcacagcaggccatgagaaaggccctgactctgagatatgccctgctgcctcacctgtacaccctgttccatcaggctcatgtggctggggagactgtggctagacccctgttcctggaattccccaaggacagctccacctggacagtggatcatcagctgctgtggggagaagccctgctgattacacctgtgctgcaggctggcaaggctgaagtgacaggctacttccctcttggcacttggtatgacctgcagacagtgcctgtggaagctctgggatctctgcctccacctcctgctgctcctagagagcctgccattcactctgaaggccagtgggttaccctgcctgctccactggataccatcaatgtgcatctgagagcaggctacatcatccctctgcaaggccctggcctgaccaccacagaatctagacagcagccaatggcactggctgtggccctgaccaaaggtggagaagctagaggggagctgttctgggatgatggggagagcctggaagtgctggaaagaggggcctatacacaagtgatttttctggctaggaacaataccattgtgaatgagcttgtcagagtcacctctgaaggtgctggcctgcagctccagaaagtgacagtgcttggagtggccacagcaccccagcaagtgctgtctaatggggtgccagtgtccaacttcacatacagccctgataccaaggtcctggacatctgtgtgtccctgcttatgggagagcagttcctggtgtcttggtgctaataatcagccataccacatttgtagaggttttacttgctttaaaaaacctcccacacctccccctgaacctgaaacataaaatgaatgcaattgttgttgttaacttgtttattgcagcttataatggttacaaataaagcaatagcatcacaaatttcacaaataaagcatttttttcactgcattctagttgtggtttgtccaaactcatcaatgtatcttatcatgtcagatctaggaacccctagtgatggagttggccactccctctctgcgcgctcgctcgctcactgaggccgggcgaccaaaggtcgcccgacgcccgggctttgcccgggcggcctcagtgagcgagcgagcgcgcag

SEQ ID NO: 734 - DNA, 4020 bp, synthetic construct
  misc_feature 1..4020: note = Synthetic
  misc_feature 1..130: note = 130 bp AAV2 ITR Left
  misc_feature 139..238: note = mAlb Splice Acceptor
  misc_feature 241..972: note = 12843 Anti-TfR scFv
  misc_feature 973..1002: note = Linker
  misc_feature 1003..3651: note = Alpha-glucosidase (70-952)
  misc_feature 3658..3884: note = SV40 PolyA
  misc_feature 3891..4020: note = 130 bp AAV2 ITR Right
  source 1..4020: mol_type = other DNA
ctgcgcgctcgctcgctcactgaggccgcccgggcaaagcccgggcgtcgggcgacctttggtcgcccggcctcagtgagcgagcgagcgcgcagagagggagtggccaactccatcactaggggttcctagatctcttaggtcagtgaagagaagaacaaaaagcagcatattacagttagttgtcttcatcaatctttaaatatgttgtgtggtttttctctccctgtttccacagttgatatccagatgacccagagccccagcagcctgtctgccagtgtgggggatagagtgaccatcacctgcagggccagccagagcatcagcagctacctcaactggtaccagcaaaagcctggcaaggcccccaaactgctgatttatgctgccagcagcctgcagtctggggtcccttccagattctctggctctggctctggcacagacttcaccctgaccatcagcagcctgcagccagaggactttgccacatactactgccagcagagctacagcaccccccctatcacctttggccagggcaccaggctggagatcaagggaggtgggggctcaggaggaggtggctctggaggaggaggctcagaggtgcagctggttgagagtggaggaggcctggtgcagcctggcagaagcctgagactgagctgtgctgcctctggcttcacctttgatgactatgccatgaactgggtgagacaggcccctggcaagggcctggaatgggtgtctggcatctcctggagctctggcagcatggactatgctgactctgtgaagggcaggttcaccatcagcagagacaatgccaagaacagcctgtacctgcagatgaacagcctgagaacagaagacacagccctgtactactgtgcaaaagccagagaagtgggagactactatggcatggatgtgtggggccaaggcaccacagtgacagtgagcagtggtggaggtggctcagggggaggaggcagtgcccatcctggcagacctagagctgtgcccacacagtgtgatgtgcctccaaacagcagatttgactgtgcccctgacaaggccatcacacaagagcagtgtgaagccagaggctgctgttacatccctgccaagcaaggactgcaaggggctcagatgggacagccctggtgcttcttcccaccatcttaccccagctacaagctggaaaacctgagcagctctgagatgggctacactgctacactgaccagaaccacacctacattcttcccaaaggacatcctgacactgaggctggatgtgatgatggaaacagagaacaggctgcacttcaccatcaaggaccctgccaatagaagatatgaggtgcccctggaaacccctcatgtgcactctagagccccatctccactgtactctgtggaattttctgaggaaccctttggggtcatagtcagaaggcagctggatggcagagtgctgctgaacacaactgtggcccctctgttctttgctgatcagttcctgcagctgagcaccagcctgcctagccagtatatcacaggcctggcagagcacctgtctccactgatgctgagcacatcctggaccagaatcaccctgtggaacagagacctggctcccacacctggggccaacctgtatggctctcaccccttctatctggccctggaagatggtggttcagcccatggtgtctttctgctgaactccaatgccatggatgtggtgctgcagccctctcctgctctgtcttggagaagcactggtggcatcctggatgtgtacatctttctgggccctgagcctaagtctgtggtgcagcagtacctggatgttgtgggctaccccttcatgcctccttattggggcctgggcttccacctgtgcagatggggatacagcagcacagccatcaccagacaggttgtggaaaacatgaccagagcacacttcccactggatgtgcagtggaatgacctggactacatggacagcagaagggacttcaccttcaacaaggatggcttcagagacttccctgccatggtgcaagagctgcaccaaggtggtagaagatatatgatgattgtggacccagccatcagctcctctggaccagctggcagctacagaccctatgatgagggactgagaagaggggtgttcatcaccaatgagacaggccagcctctgattggcaaagtgtggccaggctccacagcctttccagatttcacaaaccccacagctctggcttggtgggaagatatggtggcagagttccatgatcaggtgccctttgatggcatgtggattgacatgaatgagcccagcaacttcatcaggggctctgaggatggatgccccaacaatgaactggaaaatcctccttatgtgcctggtgttgttggagggacactgcaggcagccacaatttgtgccagctctcaccagtttctgagcacccactacaacctgcacaatctgtatggcctgactgaggccattgccagccacagggctcttgtgaaggctagaggcaccagaccttttgtgatcagcaggtccacctttgctggccatggcagatatgctggccactggactggggatgtgtggtctagttgggagcagctggctagctctgtgcctgagatcctgcagttcaacctgctgggagtgccccttgttggagcagatgtgtgtggcttcctgggcaacacctcagaggaactgtgtgtcagatggactcagctgggagcattctaccctttcatgagaaaccacaacagcctgctgagcctgcctcaagagccttacagcttttctgagccagcacagcaggccatgagaaaggccctgactctgagatatgccctgctgcctcacctgtacaccctgttccatcaggctcatgtggctggggagactgtggctagacccctgttcctggaattccccaaggacagctccacctggacagtggatcatcagctgctgtggggagaagccctgctgattacacctgtgctgcaggctggcaaggctgaagtgacaggctacttccctcttggcacttggtatgacctgcagacagtgcctgtggaagctctgggatctctgcctccacctcctgctgctcctagagagcctgccattcactctgaaggccagtgggttaccctgcctgctccactggataccatcaatgtgcatctgagagcaggctacatcatccctctgcaaggccctggcctgaccaccacagaatctagacagcagccaatggcactggctgtggccctgaccaaaggtggagaagctagaggggagctgttctgggatgatggggagagcctggaagtgctggaaagaggggcctatacacaagtgatttttctggctaggaacaataccattgtgaatgagcttgtcagagtcacctctgaaggtgctggcctgcagctccagaaagtgacagtgcttggagtggccacagcaccccagcaagtgctgtctaatggggtgccagtgtccaacttcacatacagccctgataccaaggtcctggacatctgtgtgtccctgcttatgggagagcagttcctggtgtcttggtgctaataatcagccataccacatttgtagaggttttacttgctttaaaaaacctcccacacctccccctgaacctgaaacataaaatgaatgcaattgttgttgttaacttgtttattgcagcttataatggttacaaataaagcaatagcatcacaaatttcacaaataaagcatttttttcactgcattctagttgtggtttgtccaaactcatcaatgtatcttatcatgtcagatctaggaacccctagtgatggagttggccactccctctctgcgcgctcgctcgctcactgaggccgggcgaccaaaggtcgcccgacgcccgggctttgcccgggcggcctcagtgagcgagcgagcgcgcag

SEQ ID NO: 735 - DNA, 4020 bp, synthetic construct
  misc_feature 1..4020: note = Synthetic
  misc_feature 1..130: note = 130 bp AAV2 ITR Left
  misc_feature 139..238: note = mAlb Splice Acceptor
  misc_feature 241..972: note = 12843 Anti-TfR scFv
  misc_feature 973..1002: note = Linker
  misc_feature 1003..3651: note = Alpha-glucosidase (70-952)
  misc_feature 3658..3884: note = SV40 PolyA
  misc_feature 3891..4020: note = 130 bp AAV2 ITR Right
  source 1..4020: mol_type = other DNA
ctgcgcgctcgctcgctcactgaggccgcccgggcaaagcccgggcgtcgggcgacctttggtcgcccggcctcagtgagcgagcgagcgcgcagagagggagtggccaactccatcactaggggttcctagatctcttaggtcagtgaagagaagaacaaaaagcagcatattacagttagttgtcttcatcaatctttaaatatgttgtgtggtttttctctccctgtttccacagttgacatccagatgacccagagccccagctccctgtcagccagtgtgggtgacagagtgaccatcacctgcagagccagccagagcatcagcagctacctgaactggtaccagcagaaacctggcaaagcccccaagctgctgatttatgctgctagcagcctgcagagtggagtgcccagcagattctcaggcagtggctctggcacagacttcaccctgaccatctccagcctgcagccagaagactttgccacctactactgccagcagagctacagcacccctcctatcacctttggccagggcacaagactggagatcaagggaggaggaggctctggaggaggaggctctggagggggaggctctgaggtccaactggttgaatctggagggggcctggtgcaacctggcaggagcctgagactgagctgtgctgcctctggcttcacctttgatgactatgccatgaactgggtgagacaggcccctggcaagggcctggagtgggtgtctggcatcagctggagctctggcagcatggactatgcagattctgtgaagggcaggttcaccatcagcagagataatgccaagaacagcctgtacctgcagatgaacagcctcaggacagaggacacagccctgtactactgtgccaaggccagagaagtgggtgactactatggcatggatgtgtggggccagggcaccacagtgacagtgagctctgggggaggaggctcaggtgggggtggcagtgcccatcctggcagacctagagctgtgcccacacagtgtgatgtgcctccaaacagcagatttgactgtgcccctgacaaggccatcacacaagagcagtgtgaagccagaggctgctgttacatccctgccaagcaaggactgcaaggggctcagatgggacagccctggtgcttcttcccaccatcttaccccagctacaagctggaaaacctgagcagctctgagatgggctacactgctacactgaccagaaccacacctacattcttcccaaaggacatcctgacactgaggctggatgtgatgatggaaacagagaacaggctgcacttcaccatcaaggaccctgccaatagaagatatgaggtgcccctggaaacccctcatgtgcactctagagccccatctccactgtactctgtggaattttctgaggaaccctttggggtcatagtcagaaggcagctggatggcagagtgctgctgaacacaactgtggcccctctgttctttgctgatcagttcctgcagctgagcaccagcctgcctagccagtatatcacaggcctggcagagcacctgtctccactgatgctgagcacatcctggaccagaatcaccctgtggaacagagacctggctcccacacctggggccaacctgtatggctctcaccccttctatctggccctggaagatggtggttcagcccatggtgtctttctgctgaactccaatgccatggatgtggtgctgcagccctctcctgctctgtcttggagaagcactggtggcatcctggatgtgtacatctttctgggccctgagcctaagtctgtggtgcagcagtacctggatgttgtgggctaccccttcatgcctccttattggggcctgggcttccacctgtgcagatggggatacagcagcacagccatcaccagacaggttgtggaaaacatgaccagagcacacttcccactggatgtgcagtggaatgacctggactacatggacagcagaagggacttcaccttcaacaaggatggcttcagagacttccctgccatggtgcaagagctgcaccaaggtggtagaagatatatgatgattgtggacccagccatcagctcctctggaccagctggcagctacagaccctatgatgagggactgagaagaggggtgttcatcaccaatgagacaggccagcctctgattggcaaagtgtggccaggctccacagcctttccagatttcacaaaccccacagctctggcttggtgggaagatatggtggcagagttccatgatcaggtgccctttgatggcatgtggattgacatgaatgagcccagcaacttcatcaggggctctgaggatggatgccccaacaatgaactggaaaatcctccttatgtgcctggtgttgttggagggacactgcaggcagccacaatttgtgccagctctcaccagtttctgagcacccactacaacctgcacaatctgtatggcctgactgaggccattgccagccacagggctcttgtgaaggctagaggcaccagaccttttgtgatcagcaggtccacctttgctggccatggcagatatgctggccactggactggggatgtgtggtctagttgggagcagctggctagctctgtgcctgagatcctgcagttcaacctgctgggagtgccccttgttggagcagatgtgtgtggcttcctgggcaacacctcagaggaactgtgtgtcagatggactcagctgggagcattctaccctttcatgagaaaccacaacagcctgctgagcctgcctcaagagccttacagcttttctgagccagcacagcaggccatgagaaaggccctgactctgagatatgccctgctgcctcacctgtacaccctgttccatcaggctcatgtggctggggagactgtggctagacccctgttcctggaattccccaaggacagctccacctggacagtggatcatcagctgctgtggggagaagccctgctgattacacctgtgctgcaggctggcaaggctgaagtgacaggctacttccctcttggcacttggtatgacctgcagacagtgcctgtggaagctctgggatctctgcctccacctcctgctgctcctagagagcctgccattcactctgaaggccagtgggttaccctgcctgctccactggataccatcaatgtgcatctgagagcaggctacatcatccctctgcaaggccctggcctgaccaccacagaatctagacagcagccaatggcactggctgtggccctgaccaaaggtggagaagctagaggggagctgttctgggatgatggggagagcctggaagtgctggaaagaggggcctatacacaagtgatttttctggctaggaacaataccattgtgaatgagcttgtcagagtcacctctgaaggtgctggcctgcagctccagaaagtgacagtgcttggagtggccacagcaccccagcaagtgctgtctaatggggtgccagtgtccaacttcacatacagccctgataccaaggtcctggacatctgtgtgtccctgcttatgggagagcagttcctggtgtcttggtgctaataatcagccataccacatttgtagaggttttacttgctttaaaaaacctcccacacctccccctgaacctgaaacataaaatgaatgcaattgttgttgttaacttgtttattgcagcttataatggttacaaataaagcaatagcatcacaaatttcacaaataaagcatttttttcactgcattctagttgtggtttgtccaaactcatcaatgtatcttatcatgtcagatctaggaacccctagtgatggagttggccactccctctctgcgcgctcgctcgctcactgaggccgggcgaccaaaggtcgcccgacgcccgggctttgcccgggcggcctcagtgagcgagcgagcgcgcag

SEQ ID NO: 736 - DNA, 3993 bp, synthetic construct
  misc_feature 1..3993: note = Synthetic
  misc_feature 1..130: note = 130 bp AAV2 ITR Left
  misc_feature 139..238: note = mAlb Splice Acceptor
  misc_feature 241..960: note = 12843 Anti-TfR scFv
  misc_feature 961..975: note = Linker
  misc_feature 976..3624: note = Alpha-glucosidase (70-952)
  misc_feature 3631..3857: note = SV40 PolyA
  misc_feature 3864..3993: note = 130 bp AAV2 ITR Right
  source 1..3993: mol_type = other DNA
ctgcgcgctcgctcgctcactgaggccgcccgggcaaagcccgggcgtcgggcgacctttggtcgcccggcctcagtgagcgagcgagcgcgcagagagggagtggccaactccatcactaggggttcctagatctcttaggtcagtgaagagaagaacaaaaagcagcatattacagttagttgtcttcatcaatctttaaatatgttgtgtggtttttctctccctgtttccacagttcaggtccagctgcaagagtctggccccaaggtggtcaagccctctgagacactgagcctgacctgcacagtgtctggtggcagcatcagcagctactactggaactggatcagacagagccctggcaaaggcctggaatggattggctacaccaagagaggctacacagactacaaccccagcctgagaagcagagtgaccatctctgaggacaccagcaagaaccagttcagcctgaggatcagctctgtgacagctgctgacacagcagtgtactactgtgcccagatgggctggggcagccatgcctttgatatgtggggccagggcacaatggtggctgtgtccagtgggggctcaggaggaggtggctcaggaggtggaggttcaggaggggagattgtgctgacccagtctcctggcacactgtctctgagccctggggaaagagccacactgagctgtagagccagccagtctgtgtcctctagctacctggcctggtatcagcagaagcctggacaggctcccagactgctgatctatggggcctcttctagagccacaggcatccctgacagattcagtggcagtggctctggcacagacttcaccctgaccatcagcagactggaacctgaggactttgctgtgtactattgccagcagtatggcagcagcccctggacatttggacagggcaccaaggtggaaatcaaaggtggtggtggctctgcccatcctggcagacctagagctgtgcccacacagtgtgatgtgcctccaaacagcagatttgactgtgcccctgacaaggccatcacacaagagcagtgtgaagccagaggctgctgttacatccctgccaagcaaggactgcaaggggctcagatgggacagccctggtgcttcttcccaccatcttaccccagctacaagctggaaaacctgagcagctctgagatgggctacactgctacactgaccagaaccacacctacattcttcccaaaggacatcctgacactgaggctggatgtgatgatggaaacagagaacaggctgcacttcaccatcaaggaccctgccaatagaagatatgaggtgcccctggaaacccctcatgtgcactctagagccccatctccactgtactctgtggaattttctgaggaaccctttggggtcatagtcagaaggcagctggatggcagagtgctgctgaacacaactgtggcccctctgttctttgctgatcagttcctgcagctgagcaccagcctgcctagccagtatatcacaggcctggcagagcacctgtctccactgatgctgagcacatcctggaccagaatcaccctgtggaacagagacctggctcccacacctggggccaacctgtatggctctcaccccttctatctggccctggaagatggtggttcagcccatggtgtctttctgctgaactccaatgccatggatgtggtgctgcagccctctcctgctctgtcttggagaagcactggtggcatcctggatgtgtacatctttctgggccctgagcctaagtctgtggtgcagcagtacctggatgttgtgggctaccccttcatgcctccttattggggcctgggcttccacctgtgcagatggggatacagcagcacagccatcaccagacaggttgtggaaaacatgaccagagcacacttcccactggatgtgcagtggaatgacctggactacatggacagcagaagggacttcaccttcaacaaggatggcttcagagacttccctgccatggtgcaagagctgcaccaaggtggtagaagatatatgatgattgtggacccagccatcagctcctctggaccagctggcagctacagaccctatgatgagggactgagaagaggggtgttcatcaccaatgagacaggccagcctctgattggcaaagtgtggccaggctccacagcctttccagatttcacaaaccccacagctctggcttggtgggaagatatggtggcagagttccatgatcaggtgccctttgatggcatgtggattgacatgaatgagcccagcaacttcatcaggggctctgaggatggatgccccaacaatgaactggaaaatcctccttatgtgcctggtgttgttggagggacactgcaggcagccacaatttgtgccagctctcaccagtttctgagcacccactacaacctgcacaatctgtatggcctgactgaggccattgccagccacagggctcttgtgaaggctagaggcaccagaccttttgtgatcagcaggtccacctttgctggccatggcagatatgctggccactggactggggatgtgtggtctagttgggagcagctggctagctctgtgcctgagatcctgcagttcaacctgctgggagtgccccttgttggagcagatgtgtgtggcttcctgggcaacacctcagaggaactgtgtgtcagatggactcagctgggagcattctaccctttcatgagaaaccacaacagcctgctgagcctgcctcaagagccttacagcttttctgagccagcacagcaggccatgagaaaggccctgactctgagatatgccctgctgcctcacctgtacaccctgttccatcaggctcatgtggctggggagactgtggctagacccctgttcctggaattccccaaggacagctccacctggacagtggatcatcagctgctgtggggagaagccctgctgattacacctgtgctgcaggctggcaaggctgaagtgacaggctacttccctcttggcacttggtatgacctgcagacagtgcctgtggaagctctgggatctctgcctccacctcctgctgctcctagagagcctgccattcactctgaaggccagtgggttaccctgcctgctccactggataccatcaatgtgcatctgagagcaggctacatcatccctctgcaaggccctggcctgaccaccacagaatctagacagcagccaatggcactggctgtggccctgaccaaaggtggagaagctagaggggagctgttctgggatgatggggagagcctggaagtgctggaaagaggggcctatacacaagtgatttttctggctaggaacaataccattgtgaatgagcttgtcagagtcacctctgaaggtgctggcctgcagctccagaaagtgacagtgcttggagtggccacagcaccccagcaagtgctgtctaatggggtgccagtgtccaacttcacatacagccctgataccaaggtcctggacatctgtgtgtccctgcttatgggagagcagttcctggtgtcttggtgctaataatcagccataccacatttgtagaggttttacttgctttaaaaaacctcccacacctccccctgaacctgaaacataaaatgaatgcaattgttgttgttaacttgtttattgcagcttataatggttacaaataaagcaatagcatcacaaatttcacaaataaagcatttttttcactgcattctagttgtggtttgtccaaactcatcaatgtatcttatcatgtcagatctaggaacccctagtgatggagttggccactccctctctgcgcgctcgctcgctcactgaggccgggcgaccaaaggtcgcccgacgcccgggctttgcccgggcggcctcagtgagcgagcgagcgcgcag

We claim:

1. A composition comprising a nucleic acid construct comprising a coding sequence for a multidomain therapeutic protein comprising a delivery domain fused to a lysosomal alpha-glucosidase, wherein the lysosomal alpha-glucosidase coding sequence is CpG-depleted relative to a wild type lysosomal alpha-glucosidase coding sequence, optionally wherein the delivery domain is a CD63-binding delivery domain or a TfR-binding delivery domain.

2. A composition comprising a nucleic acid construct comprising a coding sequence for a multidomain therapeutic protein comprising a CD63-binding delivery domain fused to a lysosomal alpha-glucosidase, wherein the lysosomal alpha-glucosidase coding sequence is CpG-depleted relative to a wild type lysosomal alpha-glucosidase coding sequence.

3. The composition of claim 1 or 2, wherein the CD63-binding delivery domain is fused to the lysosomal alpha-glucosidase protein via a peptide linker.

4. The composition of any one of claims 1-3, wherein the lysosomal alpha-glucosidase lacks the lysosomal alpha-glucosidase signal peptide and propeptide.

5. The composition of any one of claims 1-4, wherein the lysosomal alpha-glucosidase comprises the sequence set forth in SEQ ID NO: 173.

6. The composition of any one of claims 1-5, wherein the lysosomal alpha-glucosidase consists of the sequence set forth in SEQ ID NO: 173.

7. The composition of any one of claims 1-6, wherein the lysosomal alpha-glucosidase coding sequence is codon-optimized and CpG-depleted.

8. The composition of any one of claims 1-7, wherein the lysosomal alpha-glucosidase coding sequence is at least 90%, at least 91%, at least 92%, at least 93%, at least 94%, at least 95%, at least 96%, at least 97%, at least 98%, or at least 99% identical to any one of SEQ ID NOS: 174-182 and 205-212,
optionally wherein the lysosomal alpha-glucosidase coding sequence is at least 90%, at least 91%, at least 92%, at least 93%, at least 94%, at least 95%, at least 96%, at least 97%, at least 98%, or at least 99% identical to SEQ ID NO: 176.

9. The composition of any one of claims 1-8, wherein the lysosomal alpha-glucosidase coding sequence is at least 90%, at least 91%, at least 92%, at least 93%, at least 94%, at least 95%, at least 96%, at least 97%, at least 98%, or at least 99% identical to any one of SEQ ID NOS: 174-182 and 205-212 and encodes a lysosomal alpha-glucosidase protein comprising SEQ ID NO: 173,
optionally wherein the lysosomal alpha-glucosidase coding sequence is at least 90%, at least 91%, at least 92%, at least 93%, at least 94%, at least 95%, at least 96%, at least 97%, at least 98%, or at least 99% identical to SEQ ID NO: 176 and encodes a lysosomal alpha-glucosidase protein comprising SEQ ID NO: 173.

10. The composition of any one of claims 1-9, wherein the lysosomal alpha-glucosidase coding sequence is at least 90%, at least 91%, at least 92%, at least 93%, at least 94%, at least 95%, at least 96%, at least 97%, at least 98%, or at least 99% identical to any one of SEQ ID NOS: 174-182 and 205-212, is codon-optimized and CpG-depleted, and encodes a lysosomal alpha-glucosidase protein comprising SEQ ID NO: 173,
optionally wherein the lysosomal alpha-glucosidase coding sequence is at least 90%, at least 91%, at least 92%, at least 93%, at least 94%, at least 95%, at least 96%, at least 97%, at least 98%, or at least 99% identical to SEQ ID NO: 176, is codon-optimized and CpG-depleted, and encodes a lysosomal alpha-glucosidase protein comprising SEQ ID NO: 173.

11. The composition of any one of claims 1-10, wherein the lysosomal alpha-glucosidase coding sequence comprises the sequence set forth in any one of SEQ ID NOS: 174-182 and 205-212,
optionally wherein the lysosomal alpha-glucosidase coding sequence comprises the sequence set forth in SEQ ID NO: 176.

12. The composition of any one of claims 1-11, wherein the lysosomal alpha-glucosidase coding sequence consists of the sequence set forth in any one of SEQ ID NOS: 174-182 and 205-212,
optionally wherein the lysosomal alpha-glucosidase coding sequence consists of the sequence set forth in SEQ ID NO: 176.

13. The composition of any one of claims 1-12, wherein the coding sequence for the CD63-binding delivery domain is codon-optimized or CpG-depleted.

14. The composition of any one of claims 1-13, wherein the coding sequence for the CD63-binding delivery domain is codon-optimized and CpG-depleted.

15. The composition of any one of claims 1-14, wherein the CD63-binding delivery domain comprises an anti-CD63 antigen-binding protein.

16. The composition of any one of claims 1-15, wherein the CD63-binding delivery domain comprises an anti-CD63 antibody, antibody fragment, or single-chain variable fragment (scFv).

17. The composition of claim 16, wherein the CD63-binding delivery domain is the single-chain variable fragment (scFv).

18. The composition of claim 17, wherein the scFv comprises the sequence set forth in SEQ ID NO: 183.

19. The composition of claim 17 or 18, wherein the scFv consists of the sequence set forth in SEQ ID NO: 183.

20. The composition of any one of claims 1-19, wherein the scFv coding sequence is at least 90%, at least 91%, at least 92%, at least 93%, at least 94%, at least 95%, at least 96%, at least 97%, at least 98%, or at least 99% identical to any one of SEQ ID NOS: 184-192,
optionally wherein the scFv coding sequence is at least 90%, at least 91%, at least 92%, at least 93%, at least 94%, at least 95%, at least 96%, at least 97%, at least 98%, or at least 99% identical to SEQ ID NO: 186.

21. The composition of any one of claims 1-20, wherein the scFv coding sequence is at least 90%, at least 91%, at least 92%, at least 93%, at least 94%, at least 95%, at least 96%, at least 97%, at least 98%, or at least 99% identical to any one of SEQ ID NOS: 184-192 and encodes an scFv comprising SEQ ID NO: 183,
optionally wherein the scFv coding sequence is at least 90%, at least 91%, at least 92%, at least 93%, at least 94%, at least 95%, at least 96%, at least 97%, at least 98%, or at least 99% identical to SEQ ID NO: 186 and encodes an scFv comprising SEQ ID NO: 183.

22. The composition of any one of claims 1-21, wherein the scFv coding sequence is at least 90%, at least 91%, at least 92%, at least 93%, at least 94%, at least 95%, at least 96%, at least 97%, at least 98%, or at least 99% identical to any one of SEQ ID NOS: 184-192, is codon-optimized and CpG-depleted, and encodes an scFv comprising SEQ ID NO: 183,
optionally wherein the scFv coding sequence is at least 90%, at least 91%, at least 92%, at least 93%, at least 94%, at least 95%, at least 96%, at least 97%, at least 98%, or at least 99% identical to SEQ ID NO: 186, is codon-optimized and CpG-depleted, and encodes an scFv comprising SEQ ID NO: 183.

23. The composition of any one of claims 1-22, wherein the scFv coding sequence comprises the sequence set forth in any one of SEQ ID NOS: 184-192,
optionally wherein the scFv coding sequence comprises the sequence set forth in SEQ ID NO: 186.

24. The composition of any one of claims 1-23, wherein the scFv coding sequence consists of the sequence set forth in any one of SEQ ID NOS: 184-192,
optionally wherein the scFv coding sequence consists of the sequence set forth in SEQ ID NO: 186.

25. The composition of any one of claims 1-24, wherein the coding sequence for the multidomain therapeutic protein is codon-optimized or CpG-depleted.

26. The composition of any one of claims 1-25, wherein the coding sequence for the multidomain therapeutic protein is codon-optimized and CpG-depleted.

27. The composition of any one of claims 1-26, wherein the multidomain therapeutic protein comprises the sequence set forth in SEQ ID NO: 193.

28. The composition of any one of claims 1-27, wherein the multidomain therapeutic protein consists of the sequence set forth in SEQ ID NO: 193.

29. The composition of any one of claims 1-28, wherein the coding sequence for the multidomain therapeutic protein is at least 90%, at least 91%, at least 92%, at least 93%, at least 94%, at least 95%, at least 96%, at least 97%, at least 98%, or at least 99% identical to any one of SEQ ID NOS: 194-202,
optionally wherein the coding sequence for the multidomain therapeutic protein is at least 90%, at least 91%, at least 92%, at least 93%, at least 94%, at least 95%, at least 96%, at least 97%, at least 98%, or at least 99% identical to SEQ ID NO: 196,
optionally wherein the nucleic acid construct comprises a sequence at least 90%, at least 91%, at least 92%, at least 93%, at least 94%, at least 95%, at least 96%, at least 97%, at least 98%, or at least 99% identical to SEQ ID NO: 736.

30. The composition of any one of claims 1-29, wherein the coding sequence for the multidomain therapeutic protein is at least 90%, at least 91%, at least 92%, at least 93%, at least 94%, at least 95%, at least 96%, at least 97%, at least 98%, or at least 99% identical to any one of SEQ ID NOS: 194-202, and the multidomain therapeutic protein comprises the sequence set forth in SEQ ID NO: 193,
optionally wherein the coding sequence for the multidomain therapeutic protein is at least 90%, at least 91%, at least 92%, at least 93%, at least 94%, at least 95%, at least 96%, at least 97%, at least 98%, or at least 99% identical to SEQ ID NO: 196, and the multidomain therapeutic protein comprises the sequence set forth in SEQ ID NO: 193,
optionally wherein the nucleic acid construct comprises a sequence at least 90%, at least 91%, at least 92%, at least 93%, at least 94%, at least 95%, at least 96%, at least 97%, at least 98%, or at least 99% identical to SEQ ID NO: 736, and the multidomain therapeutic protein comprises the sequence set forth in SEQ ID NO: 193.

31. The composition of any one of claims 1-30, wherein the coding sequence for the multidomain therapeutic protein is at least 90%, at least 91%, at least 92%, at least 93%, at least 94%, at least 95%, at least 96%, at least 97%, at least 98%, or at least 99% identical to any one of SEQ ID NOS: 194-202 and is codon-optimized and CpG-depleted, and the multidomain therapeutic protein comprises the sequence set forth in SEQ ID NO: 193,
optionally wherein the coding sequence for the multidomain therapeutic protein is at least 90%, at least 91%, at least 92%, at least 93%, at least 94%, at least 95%, at least 96%, at least 97%, at least 98%, or at least 99% identical to SEQ ID NO: 196 and is codon-optimized and CpG-depleted, and the multidomain therapeutic protein comprises the sequence set forth in SEQ ID NO: 193,
optionally wherein the nucleic acid construct comprises a sequence at least 90%, at least 91%, at least 92%, at least 93%, at least 94%, at least 95%, at least 96%, at least 97%, at least 98%, or at least 99% identical to SEQ ID NO: 736, the coding sequence for the multidomain therapeutic protein is codon-optimized and CpG-depleted, and the multidomain therapeutic protein comprises the sequence set forth in SEQ ID NO: 193.

32. The composition of any one of claims 1-31, wherein the coding sequence for the multidomain therapeutic protein comprises the sequence set forth in any one of SEQ ID NOS: 194-202,
optionally wherein the coding sequence for the multidomain therapeutic protein comprises the sequence set forth in SEQ ID NO: 196,
optionally wherein the nucleic acid construct comprises the sequence set forth in SEQ ID NO: 736.

33. The composition of any one of claims 1-32, wherein the coding sequence for the multidomain therapeutic protein consists of the sequence set forth in any one of SEQ ID NOS: 194-202,
optionally wherein the coding sequence for the multidomain therapeutic protein consists of the sequence set forth in SEQ ID NO: 196,
optionally wherein the nucleic acid construct comprises the sequence set forth in SEQ ID NO: 736.

34. The composition of any one of claims 1-33, wherein the nucleic acid construct comprises a splice acceptor upstream of the coding sequence for the multidomain therapeutic protein.

35. The composition of any one of claims 1-34, wherein the nucleic acid construct comprises a polyadenylation signal or sequence downstream of the coding sequence for the multidomain therapeutic protein.

36. The composition of any one of claims 1-35, wherein the nucleic acid construct comprises a splice acceptor upstream of the coding sequence for the multidomain therapeutic protein, and the nucleic acid construct comprises a polyadenylation signal or sequence downstream of the coding sequence for the multidomain therapeutic protein.

37. The composition of any one of claims 1-36, wherein the nucleic acid construct does not comprise a homology arm.

38. The composition of any one of claims 1-36, wherein the nucleic acid construct comprises homology arms.

39. The composition of any one of claims 1-38, wherein the nucleic acid construct does not comprise a promoter that drives the expression of the multidomain therapeutic protein.

40. The composition of any one of claims 1-38, wherein the coding sequence for the multidomain therapeutic protein is operably linked to a promoter, optionally wherein the promoter is a liver-specific promoter.

41. The composition of any one of claims 1-40, wherein the nucleic acid construct is single-stranded DNA or double-stranded DNA, optionally wherein the nucleic acid construct is single-stranded DNA.

42. The composition of any one of claims 1-41, wherein the nucleic acid construct comprises from 5′ to 3′: a splice acceptor, the coding sequence for the multidomain therapeutic protein, and a polyadenylation signal or sequence,
wherein the coding sequence for the multidomain therapeutic protein comprises any one of SEQ ID NOS: 194-202, optionally wherein the coding sequence for the multidomain therapeutic protein comprises the sequence set forth in SEQ ID NO: 196, optionally wherein the nucleic acid construct comprises the sequence set forth in SEQ ID NO: 736,
wherein the nucleic acid construct does not comprise a promoter that drives the expression of the multidomain therapeutic protein, and
wherein the nucleic acid construct does not comprise a homology arm.

43. The composition of any one of claims 1-42, wherein the nucleic acid construct is in a nucleic acid vector or a lipid nanoparticle.

44. The composition of claim 43, wherein the nucleic acid construct is in the nucleic acid vector.

45. The composition of claim 44, wherein the nucleic acid vector is a viral vector.

46. The composition of claim 43 or 44, wherein the nucleic acid vector is an adeno-associated viral (AAV) vector,
optionally wherein the nucleic acid construct is flanked by inverted terminal repeats (ITRs) on each end, optionally wherein the ITR on at least one end comprises, consists essentially of, or consists of SEQ ID NO: 160, and optionally wherein the ITR on each end comprises, consists essentially of, or consists of SEQ ID NO: 160.

47. The composition of claim 46, wherein the AAV vector is a single-stranded AAV (ssAAV) vector.

48. The composition of claim 46 or 47, wherein the AAV vector is derived from an AAV8 vector, an AAV3B vector, an AAV5 vector, an AAV6 vector, an AAV7 vector, an AAV9 vector, an AAVrh.74 vector, or an AAVhu.37 vector.

49. The composition of claim 48, wherein the AAV vector is a recombinant AAV8 (rAAV8) vector.

50. The composition of claim 49, wherein the AAV vector is a single-stranded rAAV8 vector.

51. The composition of any one of claims 1-50, wherein the nucleic acid construct comprises from 5′ to 3′: a splice acceptor, the coding sequence for the multidomain therapeutic protein, and a polyadenylation signal or sequence,
wherein the coding sequence for the multidomain therapeutic protein comprises any one of SEQ ID NOS: 194-202, optionally wherein the coding sequence for the multidomain therapeutic protein comprises the sequence set forth in SEQ ID NO: 196, optionally wherein the nucleic acid construct comprises the sequence set forth in SEQ ID NO: 736,
wherein the nucleic acid construct does not comprise a promoter that drives the expression of the multidomain therapeutic protein,
wherein the nucleic acid construct does not comprise a homology arm, and
wherein the nucleic acid construct is in a single-stranded rAAV8 vector, optionally wherein the nucleic acid construct is flanked by inverted terminal repeats (ITRs) on each end, optionally wherein the ITR on at least one end comprises, consists essentially of, or consists of SEQ ID NO: 160, and optionally wherein the ITR on each end comprises, consists essentially of, or consists of SEQ ID NO: 160.

52. The composition of any one of claims 1-51, wherein the nucleic acid construct is CpG-depleted.

53. The composition of any one of claims 1-51, further comprising a nuclease agent that targets a nuclease target site in a target genomic locus.

54. The composition of claim 53, wherein the target genomic locus is an albumin gene, optionally wherein the albumin gene is a human albumin gene.

55. The composition of claim 54, wherein the nuclease target site is in intron 1 of the albumin gene.

56. The composition of any one of claims 53-55, wherein the nuclease agent comprises:
(a) a zinc finger nuclease (ZFN);
(b) a transcription activator-like effector nuclease (TALEN); or
(c) (i) a Cas protein or a nucleic acid encoding the Cas protein; and
(ii) a guide RNA or one or more DNAs encoding the guide RNA, wherein the guide RNA comprises a DNA-targeting segment that targets a guide RNA target sequence, and wherein the guide RNA binds to the Cas protein and targets the Cas protein to the guide RNA target sequence.

57. The composition of any one of claims 53-55, wherein the nuclease agent comprises:
(a) a Cas protein or a nucleic acid encoding the Cas protein; and
(b) a guide RNA or one or more DNAs encoding the guide RNA, wherein the guide RNA comprises a DNA-targeting segment that targets a guide RNA target sequence, and wherein the guide RNA binds to the Cas protein and targets the Cas protein to the guide RNA target sequence.

58. The composition of claim 57, wherein the guide RNA target sequence is in intron 1 of an albumin gene.

59. The composition of claim 58, wherein the albumin gene is a human albumin gene.

60. The composition of any one of claims 57-59, wherein:
(I) the DNA-targeting segment comprises at least 17, at least 18, at least 19, or at least 20 contiguous nucleotides of the sequence set forth in any one of SEQ ID NOS: 30-61, optionally wherein the DNA-targeting segment comprises at least 17, at least 18, at least 19, or at least 20 contiguous nucleotides of the sequence set forth in any one of SEQ ID NOS: 36, 30, 33, and 41; and/or
(II) the DNA-targeting segment is at least 90% or at least 95% identical to the sequence set forth in any one of SEQ ID NOS: 30-61, optionally wherein the DNA-targeting segment is at least 90% or at least 95% identical to the sequence set forth in any one of SEQ ID NOS: 36, 30, 33, and 41.

61. The composition of any one of claims 57-60, wherein the DNA-targeting segment comprises any one of SEQ ID NOS: 30-61, optionally wherein the DNA-targeting segment comprises any one of SEQ ID NOS: 36, 30, 33, and 41.

62. The composition of any one of claims 57-61, wherein the DNA-targeting segment consists of any one of SEQ ID NOS: 30-61, optionally wherein the DNA-targeting segment consists of any one of SEQ ID NOS: 36, 30, 33, and 41.

63. The composition of any one of claims 57-62, wherein the guide RNA comprises any one of SEQ ID NOS: 62-125, optionally wherein the guide RNA comprises any one of SEQ ID NOS: 68, 100, 62, 94, 65, 97, 73, and 105.

64. The composition of any one of claims 57-63, wherein:
(I) the DNA-targeting segment comprises at least 17, at least 18, at least 19, or at least 20 contiguous nucleotides of SEQ ID NO: 36; and/or
(II) the DNA-targeting segment is at least 90% or at least 95% identical to SEQ ID NO: 36.

65. The composition of any one of claims 57-64, wherein the DNA-targeting segment comprises SEQ ID NO: 36.

66. The composition of any one of claims 57-65, wherein the DNA-targeting segment consists of SEQ ID NO: 36.

67. The composition of any one of claims 57-66, wherein the guide RNA comprises SEQ ID NO: 68 or 100.

68. The composition of any one of claims 57-67, wherein the guide RNA in the form of RNA.

69. The composition of any one of claims 57-68, wherein the guide RNA comprises at least one modification.

70. The composition of claim 69, wherein the at least one modification comprises a 2′-O-methyl-modified nucleotide.

71. The composition of claim 69 or 70, wherein the at least one modification comprises a phosphorothioate bond between nucleotides.

72. The composition of any one of claims 69-71, wherein the at least one modification comprises a modification at one or more of the first five nucleotides at the 5′ end of the guide RNA.

73. The composition of any one of claims 69-72, wherein the at least one modification comprises a modification at one or more of the last five nucleotides at the 3′ end of the guide RNA.

74. The composition of any one of claims 69-73, wherein the at least one modification comprises phosphorothioate bonds between the first four nucleotides at the 5′ end of the guide RNA.

75. The composition of any one of claims 69-74, wherein the at least one modification comprises phosphorothioate bonds between the last four nucleotides at the 3′ end of the guide RNA.

76. The composition of any one of claims 69-75, wherein the at least one modification comprises 2′-O-methyl-modified nucleotides at the first three nucleotides at the 5′ end of the guide RNA.

77. The composition of any one of claims 69-76, wherein the at least one modification comprises 2′-O-methyl-modified nucleotides at the last three nucleotides at the 3′ end of the guide RNA.

78. The composition of any one of claims 69-77, wherein the at least one modification comprises: (i) phosphorothioate bonds between the first four nucleotides at the 5′ end of the guide RNA; (ii) phosphorothioate bonds between the last four nucleotides at the 3′ end of the guide RNA; (iii) 2′-O-methyl-modified nucleotides at the first three nucleotides at the 5′ end of the guide RNA; and (iv) 2′-O-methyl-modified nucleotides at the last three nucleotides at the 3′ end of the guide RNA.

79. The composition of any one of claims 69-78, wherein the guide RNA is a single guide RNA (sgRNA).

80. The composition of any one of claims 69-79, wherein the guide RNA in the form of RNA, the guide RNA comprises SEQ ID NO: 100, and the guide RNA comprises: (i) phosphorothioate bonds between the first four nucleotides at the 5′ end of the guide RNA; (ii) phosphorothioate bonds between the last four nucleotides at the 3′ end of the guide RNA; (iii) 2′-O-methyl-modified nucleotides at the first three nucleotides at the 5′ end of the guide RNA; and (iv) 2′-O-methyl-modified nucleotides at the last three nucleotides at the 3′ end of the guide RNA.

81. The composition of any one of claims 57-80, wherein the Cas protein is a Cas9 protein.

82. The composition of claim 81, wherein the Cas9 protein is derived from a Streptococcus pyogenes Cas9 protein, a Staphylococcus aureus Cas9 protein, a Campylobacter jejuni Cas9 protein, a Streptococcus thermophilus Cas9 protein, or a Neisseria meningitidis Cas9 protein.

83. The composition of claim 81, wherein the Cas protein is derived from a Streptococcus pyogenes Cas9 protein.

84. The composition of any one of claims 57-83, wherein the Cas protein comprises the sequence set forth in SEQ ID NO: 11.

85. The composition of any one of claims 57-84, wherein the nucleic acid encoding the Cas protein is codon-optimized for expression in a mammalian cell or a human cell.

86. The composition of any one of claims 57-85, wherein the composition comprises the nucleic acid encoding the Cas protein, wherein the nucleic acid comprises an mRNA encoding the Cas protein.

87. The composition of claim 86, wherein the mRNA encoding the Cas protein comprises at least one modification.

88. The composition of claim 86 or 87, wherein the mRNA encoding the Cas protein is modified to comprise a modified uridine at one or more or all uridine positions.

89. The composition of claim 88, wherein the modified uridine is pseudouridine or N1-methyl-pseudouridine, optionally N1-methyl-pseudouridine.

90. The composition of claim 88 or 89, wherein the mRNA encoding the Cas protein is fully substituted with pseudouridine or N1-methyl-pseudouridine, optionally N1-methyl-pseudouridine.

91. The composition of any one of claims 86-90, wherein the mRNA encoding the Cas protein comprises a 5′ cap.

92. The composition of any one of claims 86-91, wherein the mRNA encoding the Cas protein comprises a polyadenylation sequence.

93. The composition of any one of claims 86-92, wherein the mRNA encoding the Cas protein comprises the sequence set forth in SEQ ID NO: 226, 225, or 12.

94. The composition of any one of claims 57-93, wherein the composition comprises the nucleic acid encoding the Cas protein, wherein the nucleic acid comprises an mRNA encoding the Cas protein, the mRNA encoding the Cas protein comprises the sequence set forth in SEQ ID NO: 226, 225, or 12, and the mRNA encoding the Cas protein is fully substituted with pseudouridine or N1-methyl-pseudouridine, optionally N1-methyl-pseudouridine, comprises a 5′ cap, and comprises a polyadenylation sequence.

95. The composition of any one of claims 57-94, wherein the guide RNA in the form of RNA, and the guide RNA comprises SEQ ID NO: 68 or 100, and
wherein the composition comprises the nucleic acid encoding the Cas protein, wherein the nucleic acid comprises an mRNA encoding the Cas protein, and the mRNA encoding the Cas protein comprises the sequence set forth in SEQ ID NO: 226, 225, or 12.

96. The composition of claim 95, wherein the nucleic acid construct comprises from 5′ to 3′: a splice acceptor, the coding sequence for the multidomain therapeutic protein, and a polyadenylation signal or sequence,
wherein the coding sequence for the multidomain therapeutic protein comprises any one of SEQ ID NOS: 194-202, optionally wherein the coding sequence for the multidomain therapeutic protein comprises the sequence set forth in SEQ ID NO: 196, optionally wherein the nucleic acid construct comprises the sequence set forth in SEQ ID NO: 736,
wherein the nucleic acid construct does not comprise a promoter that drives the expression of the multidomain therapeutic protein,
wherein the nucleic acid construct does not comprise a homology arm, and
wherein the nucleic acid construct is in a single-stranded rAAV8 vector, optionally wherein the nucleic acid construct is flanked by inverted terminal repeats (ITRs) on each end, optionally wherein the ITR on at least one end comprises, consists essentially of, or consists of SEQ ID NO: 160, and optionally wherein the ITR on each end comprises, consists essentially of, or consists of SEQ ID NO: 160.

97. The composition of any one of claims 57-94, wherein the guide RNA in the form of RNA, the guide RNA comprises SEQ ID NO: 100, and the guide RNA comprises: (i) phosphorothioate bonds between the first four nucleotides at the 5′ end of the guide RNA; (ii) phosphorothioate bonds between the last four nucleotides at the 3′ end of the guide RNA; (iii) 2′-O-methyl-modified nucleotides at the first three nucleotides at the 5′ end of the guide RNA; and (iv) 2′-O-methyl-modified nucleotides at the last three nucleotides at the 3′ end of the guide RNA, and
wherein the composition comprises the nucleic acid encoding the Cas protein, wherein the nucleic acid comprises an mRNA encoding the Cas protein, the mRNA encoding the Cas protein comprises the sequence set forth in SEQ ID NO: 226, 225, or 12, and the mRNA encoding the Cas protein is fully substituted with pseudouridine or N1-methyl-pseudouridine, optionally N1-methyl-pseudouridine, comprises a 5′ cap, and comprises a polyadenylation sequence.

98. The composition of claim 97, wherein the nucleic acid construct comprises from 5′ to 3′: a splice acceptor, the coding sequence for the multidomain therapeutic protein, and a polyadenylation signal or sequence,
wherein the coding sequence for the multidomain therapeutic protein comprises any one of SEQ ID NOS: 194-202, optionally wherein the coding sequence for the multidomain therapeutic protein comprises the sequence set forth in SEQ ID NO: 196, optionally wherein the nucleic acid construct comprises the sequence set forth in SEQ ID NO: 736,
wherein the nucleic acid construct does not comprise a promoter that drives the expression of the multidomain therapeutic protein,
wherein the nucleic acid construct does not comprise a homology arm, and
wherein the nucleic acid construct is in a single-stranded rAAV8 vector, optionally wherein the nucleic acid construct is flanked by inverted terminal repeats (ITRs) on each end, optionally wherein the ITR on at least one end comprises, consists essentially of, or consists of SEQ ID NO: 160, and optionally wherein the ITR on each end comprises, consists essentially of, or consists of SEQ ID NO: 160.

99. The composition of any one of claims 57-98, wherein the Cas protein or the nucleic acid encoding the Cas protein and the guide RNA or the one or more DNAs encoding the guide RNA are associated with a lipid nanoparticle.

100. The composition of claim 99, wherein the lipid nanoparticle comprises a cationic lipid, a neutral lipid, a helper lipid, and a stealth lipid.

101. The composition of claim 100, wherein the cationic lipid is Lipid A ((9Z,12Z)-3-((4,4-bis(octyloxy)butanoyl)oxy)-2-((((3-(diethylamino)propoxy)carbonyl)oxy)methyl)propyl octadeca-9,12-dienoate).

102. The composition of claim 100 or 101, wherein the neutral lipid is distearoylphosphatidylcholine or 1,2-distearoyl-sn-glycero-3-phosphocholine (DSPC).

103. The composition of any one of claims 100-102, wherein the helper lipid is cholesterol.

104. The composition of any one of claims 100-103, wherein the stealth lipid is 1,2-dimyristoyl-rac-glycero-3-methoxypolyethylene glycol-2000 (PEG2k-DMG).

105. The composition of any one of claims 100-104, wherein the cationic lipid is Lipid A, the neutral lipid is DSPC, the helper lipid is cholesterol, and the stealth lipid is PEG2k-DMG.

106. The composition of any one of claims 99-105, wherein the lipid nanoparticle comprises four lipids at the following molar ratios: about 50 mol% Lipid A, about 9 mol% DSPC, about 38 mol% cholesterol, and about 3 mol% PEG2k-DMG.

107. The composition of any one of claims 99-106, wherein the albumin gene is a human albumin gene,
wherein the guide RNA in the form of RNA, and the guide RNA comprises SEQ ID NO: 68 or 100,
wherein the composition comprises the nucleic acid encoding the Cas protein, wherein the nucleic acid comprises an mRNA encoding the Cas protein, and the mRNA encoding the Cas protein comprises the sequence set forth in SEQ ID NO: 226, 225, or 12, and
wherein the guide RNA and the mRNA encoding the Cas protein are associated with a lipid nanoparticle comprising Lipid A, DSPC, cholesterol, and PEG2k-DMG, optionally at the following molar ratios: about 50 mol% Lipid A, about 9 mol% DSPC, about 38 mol% cholesterol, and about 3 mol% PEG2k-DMG.

108. The composition of claim 107, wherein the nucleic acid construct comprises from 5′ to 3′: a splice acceptor, the coding sequence for the multidomain therapeutic protein, and a polyadenylation signal or sequence,
wherein the coding sequence for the multidomain therapeutic protein comprises any one of SEQ ID NOS: 194-202, optionally wherein the coding sequence for the multidomain therapeutic protein comprises the sequence set forth in SEQ ID NO: 196, optionally wherein the nucleic acid construct comprises the sequence set forth in SEQ ID NO: 736,
wherein the nucleic acid construct does not comprise a promoter that drives the expression of the multidomain therapeutic protein,
wherein the nucleic acid construct does not comprise a homology arm, and
wherein the nucleic acid construct is in a single-stranded rAAV8 vector, optionally wherein the nucleic acid construct is flanked by inverted terminal repeats (ITRs) on each end, optionally wherein the ITR on at least one end comprises, consists essentially of, or consists of SEQ ID NO: 160, and optionally wherein the ITR on each end comprises, consists essentially of, or consists of SEQ ID NO: 160.

109. The composition of any one of claims 57-106, wherein the albumin gene is a human albumin gene,
wherein the guide RNA in the form of RNA, the guide RNA comprises SEQ ID NO: 100, and the guide RNA comprises: (i) phosphorothioate bonds between the first four nucleotides at the 5′ end of the guide RNA; (ii) phosphorothioate bonds between the last four nucleotides at the 3′ end of the guide RNA; (iii) 2′-O-methyl-modified nucleotides at the first three nucleotides at the 5′ end of the guide RNA; and (iv) 2′-O-methyl-modified nucleotides at the last three nucleotides at the 3′ end of the guide RNA,
wherein the composition comprises the nucleic acid encoding the Cas protein, wherein the nucleic acid comprises an mRNA encoding the Cas protein, the mRNA encoding the Cas protein comprises the sequence set forth in SEQ ID NO: 226, 225, or 12, and the mRNA encoding the Cas protein is fully substituted with pseudouridine or N1-methyl-pseudouridine, optionally N1-methyl-pseudouridine, comprises a 5′ cap, and comprises a polyadenylation sequence, and
wherein the guide RNA and the mRNA encoding the Cas protein are associated with a lipid nanoparticle comprising Lipid A, DSPC, cholesterol, and PEG2k-DMG, optionally at the following molar ratios: about 50 mol% Lipid A, about 9 mol% DSPC, about 38 mol% cholesterol, and about 3 mol% PEG2k-DMG.

110. The composition of claim 109, wherein the nucleic acid construct comprises from 5′ to 3′: a splice acceptor, the coding sequence for the multidomain therapeutic protein, and a polyadenylation signal or sequence,
wherein the coding sequence for the multidomain therapeutic protein comprises any one of SEQ ID NOS: 194-202, optionally wherein the coding sequence for the multidomain therapeutic protein comprises the sequence set forth in SEQ ID NO: 196, optionally wherein the nucleic acid construct comprises the sequence set forth in SEQ ID NO: 736,
wherein the nucleic acid construct does not comprise a promoter that drives the expression of the multidomain therapeutic protein,
wherein the nucleic acid construct does not comprise a homology arm, and
wherein the nucleic acid construct is in a single-stranded rAAV8 vector, optionally wherein the nucleic acid construct is flanked by inverted terminal repeats (ITRs) on each end, optionally wherein the ITR on at least one end comprises, consists essentially of, or consists of SEQ ID NO: 160, and optionally wherein the ITR on each end comprises, consists essentially of, or consists of SEQ ID NO: 160.

111. The composition of any one of claims 1-110, for use in a method of inserting the nucleic acid encoding the multidomain therapeutic protein into a target genomic locus in a cell or a population of cells.

112. The composition of any one of claims 1-110, for use in a method of expressing the multidomain therapeutic protein from a target genomic locus in a cell or a population of cells or for use in a method of expressing the multidomain therapeutic protein in a cell or a population of cells.

113. The composition of any one of claims 1-110, for use in a method of inserting the nucleic acid encoding the multidomain therapeutic protein into a target genomic locus in a cell or a population of cells in a subject.

114. The composition of any one of claims 1-110, for use in a method of expressing the multidomain therapeutic protein from a target genomic locus in a cell or a population of cells in a subject or for use in a method of expressing the multidomain therapeutic protein in a cell or a population of cells in a subject.

115. The composition of any one of claims 1-110, for use in a method of treating a lysosomal alpha-glucosidase deficiency in a subject in need thereof.

116. The composition of any one of claims 1-110, for use in a method of reducing glycogen accumulation in a tissue in a subject in need thereof.

117. The composition of any one of claims 1-110, for use in a method of treating Pompe disease in a subject in need thereof.

118. The composition of any one of claims 1-110, for use in a method of preventing or reducing the onset of a sign or symptom of Pompe disease in a neonatal subject in need thereof.

119. A cell comprising the composition of any one of claims 1-110.

120. The cell of claim 119, wherein the nucleic acid construct is integrated into a target genomic locus, and wherein the multidomain therapeutic protein is expressed from the target genomic locus, or wherein the nucleic acid construct is integrated into intron 1 of an endogenous albumin locus, and wherein the multidomain therapeutic protein is expressed from the endogenous albumin locus.

121. The cell of claim 119 or 120, wherein the cell is a liver cell.

122. The cell of claim 121, wherein the liver cell is a hepatocyte.

123. The cell of any one of claims 119-122, wherein the cell is a human cell.

124. The cell of any one of claims 119-123, wherein the cell is a neonatal cell.

125. The cell of claim 124, wherein the neonatal cell is from a human neonatal subject within 24 weeks after birth.

126. The cell of claim 124, wherein the neonatal cell is from a human neonatal subject within 12 weeks after birth.

127. The cell of claim 124, wherein the neonatal cell is from a human neonatal subject within 8 weeks after birth.

128. The cell of claim 124, wherein the neonatal cell is from a human neonatal subject within 4 weeks after birth.

129. The cell of any one of claims 119-123, wherein the cell is not a neonatal cell.

130. The cell of any one of claims 119-129, wherein the cell is in vivo.

131. The cell of any one of claims 119-129, wherein the cell is in vitro or ex vivo.

132. A method of inserting a nucleic acid encoding a multidomain therapeutic protein comprising a delivery domain fused to a lysosomal alpha-glucosidase into a target genomic locus in a cell or a population of cells, comprising administering to the cell or the population of cells the composition of any one of claims 53-110, optionally wherein the delivery domain is a CD63-binding delivery domain or a TfR-binding delivery domain,
wherein the nuclease agent cleaves the nuclease target site in the target genomic locus, and the nucleic acid construct is inserted into the target genomic locus.

133. A method of inserting a nucleic acid encoding a multidomain therapeutic protein comprising a CD63-binding delivery domain fused to a lysosomal alpha-glucosidase into a target genomic locus in a cell or a population of cells, comprising administering to the cell or the population of cells the composition of any one of claims 53-110,
wherein the nuclease agent cleaves the nuclease target site in the target genomic locus, and the nucleic acid construct is inserted into the target genomic locus.

134. A method of expressing a multidomain therapeutic protein comprising a delivery domain fused to a lysosomal alpha-glucosidase in a cell or a population of cells, comprising administering to the cell or the population of cells the composition of any one of claims 1-52, optionally wherein the delivery domain is a CD63-binding delivery domain or a TfR-binding delivery domain,
wherein the coding sequence for the multidomain therapeutic protein is operably linked to a promoter in the nucleic acid construct and is expressed in the cell or population of cells.

135. A method of expressing a multidomain therapeutic protein comprising a delivery domain fused to a lysosomal alpha-glucosidase from a target genomic locus in a cell or a population of cells, comprising administering to the cell or the population of cells the composition of any one of claims 53-110, optionally wherein the delivery domain is a CD63-binding delivery domain or a TfR-binding delivery domain,
wherein the nuclease agent cleaves the nuclease target site in the target genomic locus, the nucleic acid construct is inserted into the target genomic locus to create a modified target genomic locus, and the multidomain therapeutic protein comprising the delivery domain fused to the lysosomal alpha-glucosidase is expressed from the modified target genomic locus.

136. A method of expressing a multidomain therapeutic protein comprising a CD63-binding delivery domain fused to a lysosomal alpha-glucosidase in a cell or a population of cells, comprising administering to the cell or the population of cells the composition of any one of claims 1-52,
wherein the coding sequence for the multidomain therapeutic protein is operably linked to a promoter in the nucleic acid construct and is expressed in the cell or population of cells.

137. A method of expressing a multidomain therapeutic protein comprising a CD63-binding delivery domain fused to a lysosomal alpha-glucosidase from a target genomic locus in a cell or a population of cells, comprising administering to the cell or the population of cells the composition of any one of claims 53-110,
wherein the nuclease agent cleaves the nuclease target site in the target genomic locus, the nucleic acid construct is inserted into the target genomic locus to create a modified target genomic locus, and the multidomain therapeutic protein comprising the CD63-binding delivery domain fused to the lysosomal alpha-glucosidase is expressed from the modified target genomic locus.

138. The method of any one of claims 132-137, wherein the cell is a liver cell or the population of cells is a population of liver cells.

139. The method of any one of claims 132-138, wherein the cell is a hepatocyte or the population of cells is a population of hepatocytes.

140. The method of any one of claims 132-139, wherein the cell is a human cell or the population of cells is a population of human cells.

141. The method of any one of claims 132-140, wherein the cell is a neonatal cell or the population of cells is a population of neonatal cells.

142. The method of claim 141, wherein the neonatal cell or the population of neonatal cells is from a human neonatal subject within 24 weeks after birth, optionally wherein the neonatal cell or the population of neonatal cells is from a human neonatal subject within 12 weeks after birth.

143. The method of claim 141, wherein the neonatal cell or the population of neonatal cells is from a human neonatal subject within 8 weeks after birth, optionally wherein the neonatal cell or the population of neonatal cells is from a human neonatal subject within 4 weeks after birth.

144. The method of any one of claims 132-140, wherein the cell is not a neonatal cell or the population of cells is not a population of neonatal cells.

145. The method of any one of claims 132-144, wherein the cell is in vitro or ex vivo or the population of cells is in vitro or ex vivo.

146. The method of any one of claims 132-144, wherein the cell is in vivo in a subject or the population of cells is in vivo in a subject.

147. A method of inserting a nucleic acid encoding a multidomain therapeutic protein comprising a delivery domain fused to a lysosomal alpha-glucosidase into a target genomic locus in a cell in a subject, comprising administering to the subject the composition of any one of claims 53-110, optionally wherein the delivery domain is a CD63-binding delivery domain or a TfR-binding delivery domain,
wherein the nuclease agent cleaves the nuclease target site in the target genomic locus, and the nucleic acid construct is inserted into the target genomic locus.

148. A method of inserting a nucleic acid encoding a multidomain therapeutic protein comprising a CD63-binding delivery domain fused to a lysosomal alpha-glucosidase into a target genomic locus in a cell in a subject, comprising administering to the subject the composition of any one of claims 53-110,
wherein the nuclease agent cleaves the nuclease target site in the target genomic locus, and the nucleic acid construct is inserted into the target genomic locus.

149. A method of expressing a multidomain therapeutic protein comprising a delivery domain fused to a lysosomal alpha-glucosidase protein in a cell in a subject, comprising administering to the subject the composition of any one of claims 1-52, optionally wherein the delivery domain is a CD63-binding delivery domain or a TfR-binding delivery domain,
wherein the coding sequence for the multidomain therapeutic protein is operably linked to a promoter in the nucleic acid construct and is expressed in the cell.

150. A method of expressing a multidomain therapeutic protein comprising a delivery domain fused to a lysosomal alpha-glucosidase protein from a target genomic locus in a cell in a subject, comprising administering to the subject the composition of any one of claims 53-110, optionally wherein the delivery domain is a CD63-binding delivery domain or a TfR-binding delivery domain,
wherein the nuclease agent cleaves the nuclease target site in the target genomic locus, the nucleic acid construct is inserted into the target genomic locus to create a modified target genomic locus, and the multidomain therapeutic protein comprising the delivery domain fused to the lysosomal alpha-glucosidase is expressed from the modified target genomic locus.

151. A method of expressing a multidomain therapeutic protein comprising a CD63-binding delivery domain fused to a lysosomal alpha-glucosidase protein in a cell in a subject, comprising administering to the subject the composition of any one of claims 1-52,
wherein the coding sequence for the multidomain therapeutic protein is operably linked to a promoter in the nucleic acid construct and is expressed in the cell.

152. A method of expressing a multidomain therapeutic protein comprising a CD63-binding delivery domain fused to a lysosomal alpha-glucosidase protein from a target genomic locus in a cell in a subject, comprising administering to the subject the composition of any one of claims 53-110,
wherein the nuclease agent cleaves the nuclease target site in the target genomic locus, the nucleic acid construct is inserted into the target genomic locus to create a modified target genomic locus, and the multidomain therapeutic protein comprising the CD63-binding delivery domain fused to the lysosomal alpha-glucosidase is expressed from the modified target genomic locus.

153. The method of any one of claims 149-152, wherein the expressed multidomain therapeutic protein is delivered to and internalized by skeletal muscle and heart tissue in the subject.

154. The method of any one of claims 147-153, wherein the cell is a liver cell.

155. The method of any one of claims 147-154, wherein the cell is a hepatocyte.

156. The method of any one of claims 147-155, wherein the cell is a human cell.

157. The method of any one of claims 147-156, wherein the cell is a neonatal cell.

158. The method of claim 157, wherein the neonatal subject is a human subject within 24 weeks after birth, optionally wherein the neonatal subject is a human subject within 12 weeks after birth.

159. The method of claim 157, wherein the neonatal subject is a human subject within 8 weeks after birth, optionally wherein the neonatal subject is a human subject within 4 weeks after birth.

160. The method of any one of claims 147-156, wherein the cell is not a neonatal cell.

161. A method of treating a lysosomal alpha-glucosidase deficiency in a subject in need thereof, comprising administering to the subject the composition of any one of claims 1-52,
wherein the coding sequence for the multidomain therapeutic protein is operably linked to a promoter in the nucleic acid construct and is expressed in the subject, optionally wherein the delivery domain is a CD63-binding delivery domain or a TfR-binding delivery domain.

162. A method of treating a lysosomal alpha-glucosidase deficiency in a subject in need thereof, comprising administering to the subject the composition of any one of claims 53-110,
wherein the nuclease agent cleaves the nuclease target site in the target genomic locus, the nucleic acid construct is inserted into the target genomic locus to create a modified target genomic locus, and the multidomain therapeutic protein comprising the delivery domain fused to the lysosomal alpha-glucosidase is expressed from the modified target genomic locus, optionally wherein the delivery domain is a CD63-binding delivery domain or a TfR-binding delivery domain.

163. A method of treating a lysosomal alpha-glucosidase deficiency in a subject in need thereof, comprising administering to the subject the composition of any one of claims 1-52,
wherein the coding sequence for the multidomain therapeutic protein is operably linked to a promoter in the nucleic acid construct and is expressed in the subject.

164. A method of treating a lysosomal alpha-glucosidase deficiency in a subject in need thereof, comprising administering to the subject the composition of any one of claims 53-110,
wherein the nuclease agent cleaves the nuclease target site in the target genomic locus, the nucleic acid construct is inserted into the target genomic locus to create a modified target genomic locus, and the multidomain therapeutic protein comprising the CD63-binding delivery domain fused to the lysosomal alpha-glucosidase is expressed from the modified target genomic locus.

165. A method of reducing glycogen accumulation in a tissue in a subject in need thereof, comprising administering to the subject the composition of any one of claims 1-52,
wherein the coding sequence for the multidomain therapeutic protein is operably linked to a promoter in the nucleic acid construct and is expressed in the subject and reduces glycogen accumulation in the tissue, optionally wherein the delivery domain is a CD63-binding delivery domain or a TfR-binding delivery domain.

166. A method of reducing glycogen accumulation in a tissue in a subject in need thereof, comprising administering to the subject the composition of any one of claims 53-110,
wherein the nuclease agent cleaves the nuclease target site in the target genomic locus, the nucleic acid construct is inserted into the target genomic locus to create a modified target genomic locus, and the multidomain therapeutic protein comprising the delivery domain fused to the lysosomal alpha-glucosidase is expressed from the modified target genomic locus and reduces glycogen accumulation in the tissue, optionally wherein the delivery domain is a CD63-binding delivery domain or a TfR-binding delivery domain.

167. A method of reducing glycogen accumulation in a tissue in a subject in need thereof, comprising administering to the subject the composition of any one of claims 1-52,
wherein the coding sequence for the multidomain therapeutic protein is operably linked to a promoter in the nucleic acid construct and is expressed in the subject and reduces glycogen accumulation in the tissue.

168. A method of reducing glycogen accumulation in a tissue in a subject in need thereof, comprising administering to the subject the composition of any one of claims 53-110,
wherein the nuclease agent cleaves the nuclease target site in the target genomic locus, the nucleic acid construct is inserted into the target genomic locus to create a modified target genomic locus, and the multidomain therapeutic protein comprising the CD63-binding delivery domain fused to the lysosomal alpha-glucosidase is expressed from the modified target genomic locus and reduces glycogen accumulation in the tissue.

169. The method of any one of claims 146-168, wherein the subject has Pompe disease.

170. A method of treating Pompe disease in a subject in need thereof, comprising administering to the subject the composition of any one of claims 1-52,
wherein the coding sequence for the multidomain therapeutic protein is operably linked to a promoter in the nucleic acid construct and is expressed in the subject, thereby treating the Pompe disease, optionally wherein the delivery domain is a CD63-binding delivery domain or a TfR-binding delivery domain.

171. A method of treating Pompe disease in a subject in need thereof, comprising administering to the subject the composition of any one of claims 53-110,
wherein the nuclease agent cleaves the nuclease target site in the target genomic locus, the nucleic acid construct is inserted into the target genomic locus to create a modified target genomic locus, and the multidomain therapeutic protein comprising the delivery domain fused to the lysosomal alpha-glucosidase is expressed from the modified target genomic locus, thereby treating the Pompe disease, optionally wherein the delivery domain is a CD63-binding delivery domain or a TfR-binding delivery domain.

172. A method of treating Pompe disease in a subject in need thereof, comprising administering to the subject the composition of any one of claims 1-52,
wherein the coding sequence for the multidomain therapeutic protein is operably linked to a promoter in the nucleic acid construct and is expressed in the subject, thereby treating the Pompe disease.

173. A method of treating Pompe disease in a subject in need thereof, comprising administering to the subject the composition of any one of claims 53-110,
wherein the nuclease agent cleaves the nuclease target site in the target genomic locus, the nucleic acid construct is inserted into the target genomic locus to create a modified target genomic locus, and the multidomain therapeutic protein comprising the CD63-binding delivery domain fused to the lysosomal alpha-glucosidase is expressed from the modified target genomic locus, thereby treating the Pompe disease.

174. The method of any one of claims 169-173, wherein the Pompe disease is infantile-onset Pompe disease.

175. The method of any one of claims 169-173, wherein the Pompe disease is late-onset Pompe disease.

176. The method of any one of claims 146-175, wherein the subject is a human subject.

177. The method of any one of claims 146-176, wherein the subject is a neonatal subject, optionally wherein the neonatal subject is a human subject within 24 weeks after birth, within 12 weeks after birth, within 8 weeks after birth, or within 4 weeks after birth.

178. The method of any one of claims 146-176, wherein the subject is not a neonatal subject.

179. The method of any one of claims 146-178, wherein the method results in a therapeutically effective level of circulating multidomain therapeutic protein or lysosomal alpha-glucosidase in the subject.

180. The method of any one of claims 146-179, wherein the method reduces glycogen accumulation in skeletal muscle, heart tissue, or central nervous system tissue in the subject, optionally wherein the method reduces glycogen accumulation in skeletal muscle and heart tissue in the subject, and optionally wherein the method results in reduced glycogen levels in skeletal muscle and heart tissue in the subject comparable to wild type levels at the same age.

181. The method of any one of claims 146-180, wherein the method improves muscle strength in the subject or prevents loss of muscle strength in the subject compared to a control subject.

182. The method of claim 181, wherein the method results in the subject having muscle strength comparable to wild type levels at the same age.

183. A method of preventing or reducing the onset of a sign or symptom of Pompe disease in a subject in need thereof, comprising administering to the subject the composition of any one of claims 1-52,
wherein the coding sequence for the multidomain therapeutic protein is operably linked to a promoter in the nucleic acid construct and is expressed in the subject, thereby preventing or reducing the onset of a sign or symptom of the Pompe disease in the subject, optionally wherein the delivery domain is a CD63-binding delivery domain or a TfR-binding delivery domain.

184. A method of preventing or reducing the onset of a sign or symptom of Pompe disease in a subject in need thereof, comprising administering to the subject the composition of any one of claims 53-110,
wherein the nuclease agent cleaves the nuclease target site, the nucleic acid construct is inserted into the target genomic locus to create a modified target genomic locus, and the multidomain therapeutic protein comprising the delivery domain fused to the lysosomal alpha-glucosidase is expressed from the modified target genomic locus, thereby preventing or reducing the onset of a sign or symptom of the Pompe disease in the subject, optionally wherein the delivery domain is a CD63-binding delivery domain or a TfR-binding delivery domain.

185. A method of preventing or reducing the onset of a sign or symptom of Pompe disease in a subject in need thereof, comprising administering to the subject the composition of any one of claims 1-52,
wherein the coding sequence for the multidomain therapeutic protein is operably linked to a promoter in the nucleic acid construct and is expressed in the subject, thereby preventing or reducing the onset of a sign or symptom of the Pompe disease in the subject.

186. A method of preventing or reducing the onset of a sign or symptom of Pompe disease in a subject in need thereof, comprising administering to the subject the composition of any one of claims 53-110,
wherein the nuclease agent cleaves the nuclease target site, the nucleic acid construct is inserted into the target genomic locus to create a modified target genomic locus, and the multidomain therapeutic protein comprising the CD63-binding delivery domain fused to the lysosomal alpha-glucosidase is expressed from the modified target genomic locus, thereby preventing or reducing the onset of a sign or symptom of the Pompe disease in the subject.

187. The method of any one of claims 183-186, wherein the Pompe disease is infantile-onset Pompe disease.

188. The method of any one of claims 183-186, wherein the Pompe disease is late-onset Pompe disease.

189. The method of any one of claims 183-188, wherein the method results in a therapeutically effective level of circulating multidomain therapeutic protein or lysosomal alpha-glucosidase in the subject.

190. The method of any one of claims 183-189, wherein the method prevents or reduces glycogen accumulation in skeletal muscle, heart, or central nervous system tissue in the subject.

191. The method of any one of claims 183-190, wherein the method prevents or reduces glycogen accumulation in skeletal muscle and heart tissue in the subject.

192. The method of any one of claims 183-191, wherein the subject is a human subject.

193. The method of any one of claims 183-192, wherein the subject is a neonatal subject.

194. The method of claim 193, wherein the neonatal subject is a human subject within 24 weeks after birth, optionally wherein the neonatal subject is a human subject within 12 weeks after birth.

195. The method of claim 193, wherein the neonatal subject is a human subject within 8 weeks after birth, optionally wherein the neonatal subject is a human subject within 4 weeks after birth.

196. The method of any one of claims 183-192, wherein the subject is not a neonatal subject.

197. The method of any one of claims 146-196, wherein the method results in increased expression of the multidomain therapeutic protein in the subject compared to a method comprising administering an episomal expression vector encoding the multidomain therapeutic protein to a control subject.

198. The method of any one of claims 146-197, wherein the method results in increased serum levels of the multidomain therapeutic protein in the subject compared to a method comprising administering an episomal expression vector encoding the multidomain therapeutic protein to a control subject.

199. The method of any one of claims 146-198, wherein the method results in serum levels of the multidomain therapeutic protein in the subject of at least about 1 µg/mL, at least about 2 µg/mL, at least about 3 µg/mL, at least about 4 µg/mL, at least about 5 µg/mL, at least about 6 µg/mL, at least about 7 µg/mL, at least about 8 µg/mL, at least about 9 µg/mL, or at least about 10 µg/mL.

200. The method of any one of claims 146-199, wherein the method results in serum levels of the multidomain therapeutic protein in the subject of at least about 2 µg/mL or at least about 5 µg/mL.

201. The method of any one of claims 146-200, wherein the method results in serum levels of the multidomain therapeutic protein in the subject of between about 2 µg/mL and about 30 µg/mL or between about 2 µg/mL and about 20 µg/mL.

202. The method of any one of claims 146-201, wherein the method results in serum levels of the multidomain therapeutic protein in the subject of between about 5 µg/mL and about 30 µg/mL or between about 5 µg/mL and about 20 µg/mL.

203. The method of any one of claims 146-202, wherein the method achieves lysosomal alpha-glucosidase activity levels of at least about 40% of normal, at least about 45% of normal, at least about 50%, at least about 60%, at least about 70%, at least about 80%, at least about 90%, or 100% of normal.

204. The method of any one of claims 146-203, wherein:
(I) the subject has infantile-onset Pompe disease, and the method achieves lysosomal alpha-glucosidase expression or activity levels of at least about 1% or more than about 1% of normal; or
(II) the subject has late-onset Pompe disease, and the method achieves lysosomal alpha-glucosidase expression or activity levels of at least about 40% of normal or more than about 40% of normal.

205. The method of any one of claims 146-204, wherein the expression or activity of the multidomain therapeutic protein is at least 50% of the expression or activity of the multidomain therapeutic protein at a peak level of expression measured for the subject at 24 weeks after the administering.

206. The method of any one of claims 146-205, wherein the expression or activity of the multidomain therapeutic protein is at least 50% of the expression or activity of the multidomain therapeutic protein at a peak level of expression measured for the subject at one year after the administering.

207. The method of any one of claims 146-206, wherein the expression or activity of the multidomain therapeutic protein is at least 60% of the expression or activity of the multidomain therapeutic protein at a peak level of expression measured for the subject at 24 weeks after the administering.

208. The method of any one of claims 146-207, wherein the expression or activity of the multidomain therapeutic protein is at least 50% of the expression or activity of the multidomain therapeutic protein at a peak level of expression measured for the subject at two years after the administering.

209. The method of any one of claims 146-208, wherein the expression or activity of the multidomain therapeutic protein is at least 60% of the expression or activity of the multidomain therapeutic protein at a peak level of expression measured for the subject at 2 years after the administering.

210. The method of any one of claims 146-209, wherein the expression or activity of the multidomain therapeutic protein is at least 60% of the expression or activity of the multidomain therapeutic protein at a peak level of expression measured for the subject at 24 weeks after the administering.

211. The method of any one of claim 146-210, wherein the method further comprises assessing preexisting AAV immunity in the subject prior to administering the nucleic acid construct to the subject.

212. The method of claim 211, wherein the preexisting AAV immunity is preexisting AAV8 immunity.

213. The method of claim 211 or 212, wherein assessing preexisting AAV immunity comprises assessing immunogenicity using a total antibody immune assay or a neutralizing antibody assay.

214. The method of any one of claims 132-213, wherein the nucleic acid construct is administered simultaneously with the nuclease agent or the one or more nucleic acids encoding the nuclease agent.

215. The method of any one of claims 132-213, wherein the nucleic acid construct is not administered simultaneously with the nuclease agent or the one or more nucleic acids encoding the nuclease agent.

216. The method of claim 215, wherein the nucleic acid construct is administered prior to the nuclease agent or the one or more nucleic acids encoding the nuclease agent.

217. The method of claim 215, wherein the nucleic acid construct is administered after the nuclease agent or the one or more nucleic acids encoding the nuclease agent.

218. A composition comprising a nucleic acid construct comprising a coding sequence for a multidomain therapeutic protein comprising a TfR-binding delivery domain fused to a lysosomal alpha-glucosidase, wherein the lysosomal alpha-glucosidase coding sequence is CpG-depleted relative to a wild type lysosomal alpha-glucosidase coding sequence.

219. The composition of claim 218, wherein the TfR-binding delivery domain is fused to the lysosomal alpha-glucosidase protein via a peptide linker.

220. The composition of claim 218 or 219, wherein the lysosomal alpha-glucosidase lacks the lysosomal alpha-glucosidase signal peptide and propeptide.

221. The composition of any one of claims 218-220, wherein the lysosomal alpha-glucosidase comprises the sequence set forth in SEQ ID NO: 173.

222. The composition of any one of claims 218-221, wherein the lysosomal alpha-glucosidase consists of the sequence set forth in SEQ ID NO: 173.

223. The composition of any one of claims 218-222, wherein the lysosomal alpha-glucosidase coding sequence is codon-optimized and CpG-depleted.

224. The composition of any one of claims 218-223, wherein the lysosomal alpha-glucosidase coding sequence is at least 90%, at least 91%, at least 92%, at least 93%, at least 94%, at least 95%, at least 96%, at least 97%, at least 98%, or at least 99% identical to any one of SEQ ID NOS: 174-182 and 205-212,
optionally wherein the lysosomal alpha-glucosidase coding sequence is at least 90%, at least 91%, at least 92%, at least 93%, at least 94%, at least 95%, at least 96%, at least 97%, at least 98%, or at least 99% identical to SEQ ID NO: 176.

225. The composition of any one of claims 218-224, wherein the lysosomal alpha-glucosidase coding sequence is at least 90%, at least 91%, at least 92%, at least 93%, at least 94%, at least 95%, at least 96%, at least 97%, at least 98%, or at least 99% identical to any one of SEQ ID NOS: 174-182 and 205-212 and encodes a lysosomal alpha-glucosidase protein comprising SEQ ID NO: 173,
optionally wherein the lysosomal alpha-glucosidase coding sequence is at least 90%, at least 91%, at least 92%, at least 93%, at least 94%, at least 95%, at least 96%, at least 97%, at least 98%, or at least 99% identical to SEQ ID NO: 176 and encodes a lysosomal alpha-glucosidase protein comprising SEQ ID NO: 173.

226. The composition of any one of claims 218-225, wherein the lysosomal alpha-glucosidase coding sequence is at least 90%, at least 91%, at least 92%, at least 93%, at least 94%, at least 95%, at least 96%, at least 97%, at least 98%, or at least 99% identical to any one of SEQ ID NOS: 174-182 and 205-212, is codon-optimized and CpG-depleted, and encodes a lysosomal alpha-glucosidase protein comprising SEQ ID NO: 173,
optionally wherein the lysosomal alpha-glucosidase coding sequence is at least 90%, at least 91%, at least 92%, at least 93%, at least 94%, at least 95%, at least 96%, at least 97%, at least 98%, or at least 99% identical to SEQ ID NO: 176, is codon-optimized and CpG-depleted, and encodes a lysosomal alpha-glucosidase protein comprising SEQ ID NO: 173.

227. The composition of any one of claims 218-226, wherein the lysosomal alpha-glucosidase coding sequence comprises the sequence set forth in any one of SEQ ID NOS: 174-182 and 205-212,
optionally wherein the lysosomal alpha-glucosidase coding sequence comprises the sequence set forth in SEQ ID NO: 176.

228. The composition of any one of claims 218-227, wherein the lysosomal alpha-glucosidase coding sequence consists of the sequence set forth in any one of SEQ ID NOS: 174-182 and 205-212,
optionally wherein the lysosomal alpha-glucosidase coding sequence consists of the sequence set forth in SEQ ID NO: 176.

229. The composition of any one of claims 218-228, wherein the coding sequence for the TfR-binding delivery domain is codon-optimized or CpG-depleted.

230. The composition of any one of claims 218-229, wherein the coding sequence for the TfR-binding delivery domain is codon-optimized and CpG-depleted.

231. The composition of any one of claims 218-230, wherein the TfR-binding delivery domain comprises an anti-TfR antigen-binding protein.

232. The composition of claim 231, wherein the anti-TfR antigen binding protein comprises:
(i) a HCVR that comprises the HCDR1, HCDR2 and HCDR3 of a HCVR comprising the amino acid sequence set forth in SEQ ID NO: 217, 227, 237, 247, 257, 267, 277, 287, 297, 307, 317, 327, 337, 347, 357, 367, 377, 387, 397, 407, 417, 427, 437, 447, 457, 467, 477, 487, 497, 507, 517, or 527 (or a variant thereof); and/or
(ii) a LCVR that comprises the LCDR1, LCDR2 and LCDR3 of a LCVR comprising the amino acid sequence set forth in SEQ ID NO: 222, 232, 242, 252, 262, 272, 282, 292, 302, 312, 322, 332, 342, 352, 362, 372, 382, 392, 402, 412, 422, 432, 442, 452, 462, 472, 482, 492, 502, 512, 522, or 532 (or a variant thereof).

233. The composition of claim 231 or 232, wherein the anti-TfR antigen binding protein comprises:
(1) a HCVR comprising the HCDR1, HCDR2 and HCDR3 of a HCVR that comprises the amino acid sequence set forth in SEQ ID NO: 217 (or a variant thereof); and a LCVR comprising the LCDR1, LCDR2 and LCDR3 of a LCVR that comprises the amino acid sequence set forth in SEQ ID NO: 222 (or a variant thereof);
(2) a HCVR comprising the HCDR1, HCDR2 and HCDR3 of a HCVR that comprises the amino acid sequence set forth in SEQ ID NO: 227 (or a variant thereof); and a LCVR comprising the LCDR1, LCDR2 and LCDR3 of a LCVR that comprises the amino acid sequence set forth in SEQ ID NO: 232 (or a variant thereof);
(3) a HCVR comprising the HCDR1, HCDR2 and HCDR3 of a HCVR that comprises the amino acid sequence set forth in SEQ ID NO: 237 (or a variant thereof); and a LCVR comprising the LCDR1, LCDR2 and LCDR3 of a LCVR that comprises the amino acid sequence set forth in SEQ ID NO: 242 (or a variant thereof);
(4) a HCVR comprising the HCDR1, HCDR2 and HCDR3 of a HCVR that comprises the amino acid sequence set forth in SEQ ID NO: 247 (or a variant thereof); and a LCVR comprising the LCDR1, LCDR2 and LCDR3 of a LCVR that comprises the amino acid sequence set forth in SEQ ID NO: 252 (or a variant thereof);
(5) a HCVR comprising the HCDR1, HCDR2 and HCDR3 of a HCVR that comprises the amino acid sequence set forth in SEQ ID NO: 257 (or a variant thereof); and a LCVR comprising the LCDR1, LCDR2 and LCDR3 of a LCVR that comprises the amino acid sequence set forth in SEQ ID NO: 262 (or a variant thereof);
(6) a HCVR comprising the HCDR1, HCDR2 and HCDR3 of a HCVR that comprises the amino acid sequence set forth in SEQ ID NO: 267 (or a variant thereof); and a LCVR comprising the LCDR1, LCDR2 and LCDR3 of a LCVR that comprises the amino acid sequence set forth in SEQ ID NO: 272 (or a variant thereof);
(7) a HCVR comprising the HCDR1, HCDR2 and HCDR3 of a HCVR that comprises the amino acid sequence set forth in SEQ ID NO: 277 (or a variant thereof); and a LCVR comprising the LCDR1, LCDR2 and LCDR3 of a LCVR that comprises the amino acid sequence set forth in SEQ ID NO: 282 (or a variant thereof);
(8) a HCVR comprising the HCDR1, HCDR2 and HCDR3 of a HCVR that comprises the amino acid sequence set forth in SEQ ID NO: 287 (or a variant thereof); and a LCVR comprising the LCDR1, LCDR2 and LCDR3 of a LCVR that comprises the amino acid sequence set forth in SEQ ID NO: 292 (or a variant thereof);
(9) a HCVR comprising the HCDR1, HCDR2 and HCDR3 of a HCVR that comprises the amino acid sequence set forth in SEQ ID NO: 297 (or a variant thereof); and a LCVR comprising the LCDR1, LCDR2 and LCDR3 of a LCVR that comprises the amino acid sequence set forth in SEQ ID NO: 302 (or a variant thereof);
(10) a HCVR comprising the HCDR1, HCDR2 and HCDR3 of a HCVR that comprises the amino acid sequence set forth in SEQ ID NO: 307 (or a variant thereof); and a LCVR comprising the LCDR1, LCDR2 and LCDR3 of a LCVR that comprises the amino acid sequence set forth in SEQ ID NO: 312 (or a variant thereof);
(11) a HCVR comprising the HCDR1, HCDR2 and HCDR3 of a HCVR that comprises the amino acid sequence set forth in SEQ ID NO: 317 (or a variant thereof); and a LCVR comprising the LCDR1, LCDR2 and LCDR3 of a LCVR that comprises the amino acid sequence set forth in SEQ ID NO: 322 (or a variant thereof);
(12) a HCVR comprising the HCDR1, HCDR2 and HCDR3 of a HCVR that comprises the amino acid sequence set forth in SEQ ID NO: 327 (or a variant thereof); and a LCVR comprising the LCDR1, LCDR2 and LCDR3 of a LCVR that comprises the amino acid sequence set forth in SEQ ID NO: 332 (or a variant thereof);
(13) a HCVR comprising the HCDR1, HCDR2 and HCDR3 of a HCVR that comprises the amino acid sequence set forth in SEQ ID NO: 337 (or a variant thereof); and a LCVR comprising the LCDR1, LCDR2 and LCDR3 of a LCVR that comprises the amino acid sequence set forth in SEQ ID NO: 342 (or a variant thereof);
(14) a HCVR comprising the HCDR1, HCDR2 and HCDR3 of a HCVR that comprises the amino acid sequence set forth in SEQ ID NO: 347 (or a variant thereof); and a LCVR comprising the LCDR1, LCDR2 and LCDR3 of a LCVR that comprises the amino acid sequence set forth in SEQ ID NO: 352 (or a variant thereof);
(15) a HCVR comprising the HCDR1, HCDR2 and HCDR3 of a HCVR that comprises the amino acid sequence set forth in SEQ ID NO: 357 (or a variant thereof); and a LCVR comprising the LCDR1, LCDR2 and LCDR3 of a LCVR that comprises the amino acid sequence set forth in SEQ ID NO: 362 (or a variant thereof);
(16) a HCVR comprising the HCDR1, HCDR2 and HCDR3 of a HCVR that comprises the amino acid sequence set forth in SEQ ID NO: 367 (or a variant thereof); and a LCVR comprising the LCDR1, LCDR2 and LCDR3 of a LCVR that comprises the amino acid sequence set forth in SEQ ID NO: 372 (or a variant thereof);
(17) a HCVR comprising the HCDR1, HCDR2 and HCDR3 of a HCVR that comprises the amino acid sequence set forth in SEQ ID NO: 377 (or a variant thereof); and a LCVR comprising the LCDR1, LCDR2 and LCDR3 of a LCVR that comprises the amino acid sequence set forth in SEQ ID NO: 382 (or a variant thereof);
(18) a HCVR comprising the HCDR1, HCDR2 and HCDR3 of a HCVR that comprises the amino acid sequence set forth in SEQ ID NO: 387 (or a variant thereof); and a LCVR comprising the LCDR1, LCDR2 and LCDR3 of a LCVR that comprises the amino acid sequence set forth in SEQ ID NO: 392 (or a variant thereof);
(19) a HCVR comprising the HCDR1, HCDR2 and HCDR3 of a HCVR that comprises the amino acid sequence set forth in SEQ ID NO: 397 (or a variant thereof); and a LCVR comprising the LCDR1, LCDR2 and LCDR3 of a LCVR that comprises the amino acid sequence set forth in SEQ ID NO: 402 (or a variant thereof);
(20) a HCVR comprising the HCDR1, HCDR2 and HCDR3 of a HCVR that comprises the amino acid sequence set forth in SEQ ID NO: 407 (or a variant thereof); and a LCVR comprising the LCDR1, LCDR2 and LCDR3 of a LCVR that comprises the amino acid sequence set forth in SEQ ID NO: 412 (or a variant thereof);
(21) a HCVR comprising the HCDR1, HCDR2 and HCDR3 of a HCVR that comprises the amino acid sequence set forth in SEQ ID NO: 417 (or a variant thereof); and a LCVR comprising the LCDR1, LCDR2 and LCDR3 of a LCVR that comprises the amino acid sequence set forth in SEQ ID NO: 422 (or a variant thereof);
(22) a HCVR comprising the HCDR1, HCDR2 and HCDR3 of a HCVR that comprises the amino acid sequence set forth in SEQ ID NO: 427 (or a variant thereof); and a LCVR comprising the LCDR1, LCDR2 and LCDR3 of a LCVR that comprises the amino acid sequence set forth in SEQ ID NO: 432 (or a variant thereof);
(23) a HCVR comprising the HCDR1, HCDR2 and HCDR3 of a HCVR that comprises the amino acid sequence set forth in SEQ ID NO: 437 (or a variant thereof); and a LCVR comprising the LCDR1, LCDR2 and LCDR3 of a LCVR that comprises the amino acid sequence set forth in SEQ ID NO: 442 (or a variant thereof);
(24) a HCVR comprising the HCDR1, HCDR2 and HCDR3 of a HCVR that comprises the amino acid sequence set forth in SEQ ID NO: 447 (or a variant thereof); and a LCVR comprising the LCDR1, LCDR2 and LCDR3 of a LCVR that comprises the amino acid sequence set forth in SEQ ID NO: 452 (or a variant thereof);
(25) a HCVR comprising the HCDR1, HCDR2 and HCDR3 of a HCVR that comprises the amino acid sequence set forth in SEQ ID NO: 457 (or a variant thereof); and a LCVR comprising the LCDR1, LCDR2 and LCDR3 of a LCVR that comprises the amino acid sequence set forth in SEQ ID NO: 462 (or a variant thereof);
(26) a HCVR comprising the HCDR1, HCDR2 and HCDR3 of a HCVR that comprises the amino acid sequence set forth in SEQ ID NO: 467 (or a variant thereof); and a LCVR comprising the LCDR1, LCDR2 and LCDR3 of a LCVR that comprises the amino acid sequence set forth in SEQ ID NO: 472 (or a variant thereof);
(27) a HCVR comprising the HCDR1, HCDR2 and HCDR3 of a HCVR that comprises the amino acid sequence set forth in SEQ ID NO: 477 (or a variant thereof); and a LCVR comprising the LCDR1, LCDR2 and LCDR3 of a LCVR that comprises the amino acid sequence set forth in SEQ ID NO: 482 (or a variant thereof);
(28) a HCVR comprising the HCDR1, HCDR2 and HCDR3 of a HCVR that comprises the amino acid sequence set forth in SEQ ID NO: 487 (or a variant thereof); and a LCVR comprising the LCDR1, LCDR2 and LCDR3 of a LCVR that comprises the amino acid sequence set forth in SEQ ID NO: 492 (or a variant thereof);
(29) a HCVR comprising the HCDR1, HCDR2 and HCDR3 of a HCVR that comprises the amino acid sequence set forth in SEQ ID NO: 497 (or a variant thereof); and a LCVR comprising the LCDR1, LCDR2 and LCDR3 of a LCVR that comprises the amino acid sequence set forth in SEQ ID NO: 502 (or a variant thereof);
(30) a HCVR comprising the HCDR1, HCDR2 and HCDR3 of a HCVR that comprises the amino acid sequence set forth in SEQ ID NO: 507 (or a variant thereof); and a LCVR comprising the LCDR1, LCDR2 and LCDR3 of a LCVR that comprises the amino acid sequence set forth in SEQ ID NO: 512 (or a variant thereof);
(31) a HCVR comprising the HCDR1, HCDR2 and HCDR3 of a HCVR that comprises the amino acid sequence set forth in SEQ ID NO: 517 (or a variant thereof); and a LCVR comprising the LCDR1, LCDR2 and LCDR3 of a LCVR that comprises the amino acid sequence set forth in SEQ ID NO: 522 (or a variant thereof); or
(32) a HCVR comprising the HCDR1, HCDR2 and HCDR3 of a HCVR that comprises the amino acid sequence set forth in SEQ ID NO: 527 (or a variant thereof); and a LCVR comprising the LCDR1, LCDR2 and LCDR3 of a LCVR that comprises the amino acid sequence set forth in SEQ ID NO: 532 (or a variant thereof).

234. The composition of any one of claims 231-233, wherein the anti-TfR antigen binding protein comprises:
(1) a HCVR comprising the HCDR1, HCDR2 and HCDR3 of a HCVR that comprises the amino acid sequence set forth in SEQ ID NO: 437 (or a variant thereof); and a LCVR comprising the LCDR1, LCDR2 and LCDR3 of a LCVR that comprises the amino acid sequence set forth in SEQ ID NO: 442 (or a variant thereof); or
(2) a HCVR comprising the HCDR1, HCDR2 and HCDR3 of a HCVR that comprises the amino acid sequence set forth in SEQ ID NO: 457 (or a variant thereof); and a LCVR comprising the LCDR1, LCDR2 and LCDR3 of a LCVR that comprises the amino acid sequence set forth in SEQ ID NO: 462 (or a variant thereof).

235. The composition of any one of claims 231-234, wherein the anti-TfR antigen binding protein comprises:
(a) a HCVR that comprises: an HCDR1 comprising the amino acid sequence set forth in SEQ ID NO: 218 (or a variant thereof), an HCDR2 comprising the amino acid sequence set forth in SEQ ID NO: 219 (or a variant thereof), and an HCDR3 comprising the amino acid sequence set forth in SEQ ID NO: 220 (or a variant thereof); and a LCVR that comprises: an LCDR1 comprising the amino acid sequence set forth in SEQ ID NO: 223 (or a variant thereof), an LCDR2 comprising the amino acid sequence set forth in SEQ ID NO: 224 (or a variant thereof), and an LCDR3 comprising the amino acid sequence set forth in SEQ ID NO: 225 (or a variant thereof);
(b) a HCVR that comprises: an HCDR1 comprising the amino acid sequence set forth in SEQ ID NO: 228 (or a variant thereof), an HCDR2 comprising the amino acid sequence set forth in SEQ ID NO: 229 (or a variant thereof), and an HCDR3 comprising the amino acid sequence set forth in SEQ ID NO: 230 (or a variant thereof); and a LCVR that comprises: an LCDR1 comprising the amino acid sequence set forth in SEQ ID NO: 233 (or a variant thereof), an LCDR2 comprising the amino acid sequence set forth in SEQ ID NO: 234 (or a variant thereof), and an LCDR3 comprising the amino acid sequence set forth in SEQ ID NO: 235 (or a variant thereof);
(c) a HCVR that comprises: an HCDR1 comprising the amino acid sequence set forth in SEQ ID NO: 238 (or a variant thereof), an HCDR2 comprising the amino acid sequence set forth in SEQ ID NO: 239 (or a variant thereof), and an HCDR3 comprising the amino acid sequence set forth in SEQ ID NO: 240 (or a variant thereof); and a LCVR that comprises: an LCDR1 comprising the amino acid sequence set forth in SEQ ID NO: 243 (or a variant thereof), an LCDR2 comprising the amino acid sequence set forth in SEQ ID NO: 244 (or a variant thereof), and an LCDR3 comprising the amino acid sequence set forth in SEQ ID NO: 245 (or a variant thereof);
(d) a HCVR that comprises: an HCDR1 comprising the amino acid sequence set forth in SEQ ID NO: 248 (or a variant thereof), an HCDR2 comprising the amino acid sequence set forth in SEQ ID NO: 249 (or a variant thereof), and an HCDR3 comprising the amino acid sequence set forth in SEQ ID NO: 250 (or a variant thereof); and a LCVR that comprises: an LCDR1 comprising the amino acid sequence set forth in SEQ ID NO: 253 (or a variant thereof), an LCDR2 comprising the amino acid sequence set forth in SEQ ID NO: 254 (or a variant thereof), and an LCDR3 comprising the amino acid sequence set forth in SEQ ID NO: 255 (or a variant thereof);
(e) a HCVR that comprises: an HCDR1 comprising the amino acid sequence set forth in SEQ ID NO: 258 (or a variant thereof), an HCDR2 comprising the amino acid sequence set forth in SEQ ID NO: 259 (or a variant thereof), and an HCDR3 comprising the amino acid sequence set forth in SEQ ID NO: 260 (or a variant thereof); and a LCVR that comprises: an LCDR1 comprising the amino acid sequence set forth in SEQ ID NO: 263 (or a variant thereof), an LCDR2 comprising the amino acid sequence set forth in SEQ ID NO: 264 (or a variant thereof), and an LCDR3 comprising the amino acid sequence set forth in SEQ ID NO: 265 (or a variant thereof);
(f) a HCVR that comprises: an HCDR1 comprising the amino acid sequence set forth in SEQ ID NO: 268 (or a variant thereof), an HCDR2 comprising the amino acid sequence set forth in SEQ ID NO: 269 (or a variant thereof), and an HCDR3 comprising the amino acid sequence set forth in SEQ ID NO: 270 (or a variant thereof); and a LCVR that comprises: an LCDR1 comprising the amino acid sequence set forth in SEQ ID NO: 273 (or a variant thereof), an LCDR2 comprising the amino acid sequence set forth in SEQ ID NO: 274 (or a variant thereof), and an LCDR3 comprising the amino acid sequence set forth in SEQ ID NO: 275 (or a variant thereof);
(g) a HCVR that comprises: an HCDR1 comprising the amino acid sequence set forth in SEQ ID NO: 278 (or a variant thereof), an HCDR2 comprising the amino acid sequence set forth in SEQ ID NO: 279 (or a variant thereof), and an HCDR3 comprising the amino acid sequence set forth in SEQ ID NO: 280 (or a variant thereof); and a LCVR that comprises: an LCDR1 comprising the amino acid sequence set forth in SEQ ID NO: 283 (or a variant thereof), an LCDR2 comprising the amino acid sequence set forth in SEQ ID NO: 284 (or a variant thereof), and an LCDR3 comprising the amino acid sequence set forth in SEQ ID NO: 285 (or a variant thereof);
(h) a HCVR that comprises: an HCDR1 comprising the amino acid sequence set forth in SEQ ID NO: 288 (or a variant thereof), an HCDR2 comprising the amino acid sequence set forth in SEQ ID NO: 289 (or a variant thereof), and an HCDR3 comprising the amino acid sequence set forth in SEQ ID NO: 290 (or a variant thereof); and a LCVR that comprises: an LCDR1 comprising the amino acid sequence set forth in SEQ ID NO: 293 (or a variant thereof), an LCDR2 comprising the amino acid sequence set forth in SEQ ID NO: 294 (or a variant thereof), and an LCDR3 comprising the amino acid sequence set forth in SEQ ID NO: 295 (or a variant thereof);
(i) a HCVR that comprises: an HCDR1 comprising the amino acid sequence set forth in SEQ ID NO: 298 (or a variant thereof), an HCDR2 comprising the amino acid sequence set forth in SEQ ID NO: 299 (or a variant thereof), and an HCDR3 comprising the amino acid sequence set forth in SEQ ID NO: 300 (or a variant thereof); and a LCVR that comprises: an LCDR1 comprising the amino acid sequence set forth in SEQ ID NO: 303 (or a variant thereof), an LCDR2 comprising the amino acid sequence set forth in SEQ ID NO: 304 (or a variant thereof), and an LCDR3 comprising the amino acid sequence set forth in SEQ ID NO: 305 (or a variant thereof);
(j) a HCVR that comprises: an HCDR1 comprising the amino acid sequence set forth in SEQ ID NO: 308 (or a variant thereof), an HCDR2 comprising the amino acid sequence set forth in SEQ ID NO: 309 (or a variant thereof), and an HCDR3 comprising the amino acid sequence set forth in SEQ ID NO: 310 (or a variant thereof); and a LCVR that comprises: an LCDR1 comprising the amino acid sequence set forth in SEQ ID NO: 313 (or a variant thereof), an LCDR2 comprising the amino acid sequence set forth in SEQ ID NO: 314 (or a variant thereof), and an LCDR3 comprising the amino acid sequence set forth in SEQ ID NO: 315 (or a variant thereof);
(k) a HCVR that comprises: an HCDR1 comprising the amino acid sequence set forth in SEQ ID NO: 318 (or a variant thereof), an HCDR2 comprising the amino acid sequence set forth in SEQ ID NO: 319 (or a variant thereof), and an HCDR3 comprising the amino acid sequence set forth in SEQ ID NO: 320 (or a variant thereof); and a LCVR that comprises: an LCDR1 comprising the amino acid sequence set forth in SEQ ID NO: 323 (or a variant thereof), an LCDR2 comprising the amino acid sequence set forth in SEQ ID NO: 324 (or a variant thereof), and an LCDR3 comprising the amino acid sequence set forth in SEQ ID NO: 325 (or a variant thereof);
(1) a HCVR that comprises: an HCDR1 comprising the amino acid sequence set forth in SEQ ID NO: 328 (or a variant thereof), an HCDR2 comprising the amino acid sequence set forth in SEQ ID NO: 329 (or a variant thereof), and an HCDR3 comprising the amino acid sequence set forth in SEQ ID NO: 330 (or a variant thereof); and a LCVR that comprises: an LCDR1 comprising the amino acid sequence set forth in SEQ ID NO: 333 (or a variant thereof), an LCDR2 comprising the amino acid sequence set forth in SEQ ID NO: 334 (or a variant thereof), and an LCDR3 comprising the amino acid sequence set forth in SEQ ID NO: 335 (or a variant thereof);
(m) a HCVR that comprises: an HCDR1 comprising the amino acid sequence set forth in SEQ ID NO: 338 (or a variant thereof), an HCDR2 comprising the amino acid sequence set forth in SEQ ID NO: 339 (or a variant thereof), and an HCDR3 comprising the amino acid sequence set forth in SEQ ID NO: 340 (or a variant thereof); and a LCVR that comprises: an LCDR1 comprising the amino acid sequence set forth in SEQ ID NO: 343 (or a variant thereof), an LCDR2 comprising the amino acid sequence set forth in SEQ ID NO: 344 (or a variant thereof), and an LCDR3 comprising the amino acid sequence set forth in SEQ ID NO: 345 (or a variant thereof);
(n) a HCVR that comprises: an HCDR1 comprising the amino acid sequence set forth in SEQ ID NO: 348 (or a variant thereof), an HCDR2 comprising the amino acid sequence set forth in SEQ ID NO: 349 (or a variant thereof), and an HCDR3 comprising the amino acid sequence set forth in SEQ ID NO: 350 (or a variant thereof); and a LCVR that comprises: an LCDR1 comprising the amino acid sequence set forth in SEQ ID NO: 353 (or a variant thereof), an LCDR2 comprising the amino acid sequence set forth in SEQ ID NO: 354 (or a variant thereof), and an LCDR3 comprising the amino acid sequence set forth in SEQ ID NO: 355 (or a variant thereof);
(o) a HCVR that comprises: an HCDR1 comprising the amino acid sequence set forth in SEQ ID NO: 358 (or a variant thereof), an HCDR2 comprising the amino acid sequence set forth in SEQ ID NO: 359 (or a variant thereof), and an HCDR3 comprising the amino acid sequence set forth in SEQ ID NO: 360 (or a variant thereof); and a LCVR that comprises: an LCDR1 comprising the amino acid sequence set forth in SEQ ID NO: 363 (or a variant thereof), an LCDR2 comprising the amino acid sequence set forth in SEQ ID NO: 364 (or a variant thereof), and an LCDR3 comprising the amino acid sequence set forth in SEQ ID NO: 365 (or a variant thereof);
(p) a HCVR that comprises: an HCDR1 comprising the amino acid sequence set forth in SEQ ID NO: 368 (or a variant thereof), an HCDR2 comprising the amino acid sequence set forth in SEQ ID NO: 369 (or a variant thereof), and an HCDR3 comprising the amino acid sequence set forth in SEQ ID NO: 370 (or a variant thereof); and a LCVR that comprises: an LCDR1 comprising the amino acid sequence set forth in SEQ ID NO: 373 (or a variant thereof), an LCDR2 comprising the amino acid sequence set forth in SEQ ID NO: 374 (or a variant thereof), and an LCDR3 comprising the amino acid sequence set forth in SEQ ID NO: 375 (or a variant thereof);
(q) a HCVR that comprises: an HCDR1 comprising the amino acid sequence set forth in SEQ ID NO: 378 (or a variant thereof), an HCDR2 comprising the amino acid sequence set forth in SEQ ID NO: 379 (or a variant thereof), and an HCDR3 comprising the amino acid sequence set forth in SEQ ID NO: 380 (or a variant thereof); and a LCVR that comprises: an LCDR1 comprising the amino acid sequence set forth in SEQ ID NO: 383 (or a variant thereof), an LCDR2 comprising the amino acid sequence set forth in SEQ ID NO: 384 (or a variant thereof), and an LCDR3 comprising the amino acid sequence set forth in SEQ ID NO: 385 (or a variant thereof);
(r) a HCVR that comprises: an HCDR1 comprising the amino acid sequence set forth in SEQ ID NO: 388 (or a variant thereof), an HCDR2 comprising the amino acid sequence set forth in SEQ ID NO: 389 (or a variant thereof), and an HCDR3 comprising the amino acid sequence set forth in SEQ ID NO: 390 (or a variant thereof); and a LCVR that comprises: an LCDR1 comprising the amino acid sequence set forth in SEQ ID NO: 393 (or a variant thereof), an LCDR2 comprising the amino acid sequence set forth in SEQ ID NO: 394 (or a variant thereof), and an LCDR3 comprising the amino acid sequence set forth in SEQ ID NO: 395 (or a variant thereof);
(s) a HCVR that comprises: an HCDR1 comprising the amino acid sequence set forth in SEQ ID NO: 398 (or a variant thereof), an HCDR2 comprising the amino acid sequence set forth in SEQ ID NO: 399 (or a variant thereof), and an HCDR3 comprising the amino acid sequence set forth in SEQ ID NO: 400 (or a variant thereof); and a LCVR that comprises: an LCDR1 comprising the amino acid sequence set forth in SEQ ID NO: 403 (or a variant thereof), an LCDR2 comprising the amino acid sequence set forth in SEQ ID NO: 404 (or a variant thereof), and an LCDR3 comprising the amino acid sequence set forth in SEQ ID NO: 405 (or a variant thereof);
(t) a HCVR that comprises: an HCDR1 comprising the amino acid sequence set forth in SEQ ID NO: 408 (or a variant thereof), an HCDR2 comprising the amino acid sequence set forth in SEQ ID NO: 409 (or a variant thereof), and an HCDR3 comprising the amino acid sequence set forth in SEQ ID NO: 410 (or a variant thereof); and a LCVR that comprises: an LCDR1 comprising the amino acid sequence set forth in SEQ ID NO: 413 (or a variant thereof), an LCDR2 comprising the amino acid sequence set forth in SEQ ID NO: 414 (or a variant thereof), and an LCDR3 comprising the amino acid sequence set forth in SEQ ID NO: 415 (or a variant thereof);
(u) a HCVR that comprises: an HCDR1 comprising the amino acid sequence set forth in SEQ ID NO: 418 (or a variant thereof), an HCDR2 comprising the amino acid sequence set forth in SEQ ID NO: 419 (or a variant thereof), and an HCDR3 comprising the amino acid sequence set forth in SEQ ID NO: 420 (or a variant thereof); and a LCVR that comprises: an LCDR1 comprising the amino acid sequence set forth in SEQ ID NO: 423 (or a variant thereof), an LCDR2 comprising the amino acid sequence set forth in SEQ ID NO: 424 (or a variant thereof), and an LCDR3 comprising the amino acid sequence set forth in SEQ ID NO: 425 (or a variant thereof);
(v) a HCVR that comprises: an HCDR1 comprising the amino acid sequence set forth in SEQ ID NO: 428 (or a variant thereof), an HCDR2 comprising the amino acid sequence set forth in SEQ ID NO: 429 (or a variant thereof), and an HCDR3 comprising the amino acid sequence set forth in SEQ ID NO: 430 (or a variant thereof); and a LCVR that comprises: an LCDR1 comprising the amino acid sequence set forth in SEQ ID NO: 433 (or a variant thereof), an LCDR2 comprising the amino acid sequence set forth in SEQ ID NO: 434 (or a variant thereof), and an LCDR3 comprising the amino acid sequence set forth in SEQ ID NO: 435 (or a variant thereof);
(w) a HCVR that comprises: an HCDR1 comprising the amino acid sequence set forth in SEQ ID NO: 438 (or a variant thereof), an HCDR2 comprising the amino acid sequence set forth in SEQ ID NO: 439 (or a variant thereof), and an HCDR3 comprising the amino acid sequence set forth in SEQ ID NO: 440 (or a variant thereof); and a LCVR that comprises: an LCDR1 comprising the amino acid sequence set forth in SEQ ID NO: 443 (or a variant thereof), an LCDR2 comprising the amino acid sequence set forth in SEQ ID NO: 444 (or a variant thereof), and an LCDR3 comprising the amino acid sequence set forth in SEQ ID NO: 445 (or a variant thereof);
(x) a HCVR that comprises: an HCDR1 comprising the amino acid sequence set forth in SEQ ID NO: 448 (or a variant thereof), an HCDR2 comprising the amino acid sequence set forth in SEQ ID NO: 449 (or a variant thereof), and an HCDR3 comprising the amino acid sequence set forth in SEQ ID NO: 450 (or a variant thereof); and a LCVR that comprises: an LCDR1 comprising the amino acid sequence set forth in SEQ ID NO: 453 (or a variant thereof), an LCDR2 comprising the amino acid sequence set forth in SEQ ID NO: 454 (or a variant thereof), and an LCDR3 comprising the amino acid sequence set forth in SEQ ID NO: 455 (or a variant thereof);
(y) a HCVR that comprises: an HCDR1 comprising the amino acid sequence set forth in SEQ ID NO: 458 (or a variant thereof), an HCDR2 comprising the amino acid sequence set forth in SEQ ID NO: 459 (or a variant thereof), and an HCDR3 comprising the amino acid sequence set forth in SEQ ID NO: 460 (or a variant thereof); and a LCVR that comprises: an LCDR1 comprising the amino acid sequence set forth in SEQ ID NO: 463 (or a variant thereof), an LCDR2 comprising the amino acid sequence set forth in SEQ ID NO: 464 (or a variant thereof), and an LCDR3 comprising the amino acid sequence set forth in SEQ ID NO: 465 (or a variant thereof);
(z) a HCVR that comprises: an HCDR1 comprising the amino acid sequence set forth in SEQ ID NO: 468 (or a variant thereof), an HCDR2 comprising the amino acid sequence set forth in SEQ ID NO: 469 (or a variant thereof), and an HCDR3 comprising the amino acid sequence set forth in SEQ ID NO: 470 (or a variant thereof); and a LCVR that comprises: an LCDR1 comprising the amino acid sequence set forth in SEQ ID NO: 473 (or a variant thereof), an LCDR2 comprising the amino acid sequence set forth in SEQ ID NO: 474 (or a variant thereof), and an LCDR3 comprising the amino acid sequence set forth in SEQ ID NO: 475 (or a variant thereof);
(aa) a HCVR that comprises: an HCDR1 comprising the amino acid sequence set forth in SEQ ID NO: 478 (or a variant thereof), an HCDR2 comprising the amino acid sequence set forth in SEQ ID NO: 479 (or a variant thereof), and an HCDR3 comprising the amino acid sequence set forth in SEQ ID NO: 480 (or a variant thereof); and a LCVR that comprises: an LCDR1 comprising the amino acid sequence set forth in SEQ ID NO: 483 (or a variant thereof), an LCDR2 comprising the amino acid sequence set forth in SEQ ID NO: 484 (or a variant thereof), and an LCDR3 comprising the amino acid sequence set forth in SEQ ID NO: 485 (or a variant thereof);
(ab) a HCVR that comprises: an HCDR1 comprising the amino acid sequence set forth in SEQ ID NO: 488 (or a variant thereof), an HCDR2 comprising the amino acid sequence set forth in SEQ ID NO: 489 (or a variant thereof), and an HCDR3 comprising the amino acid sequence set forth in SEQ ID NO: 490 (or a variant thereof); and a LCVR that comprises: an LCDR1 comprising the amino acid sequence set forth in SEQ ID NO: 493 (or a variant thereof), an LCDR2 comprising the amino acid sequence set forth in SEQ ID NO: 494 (or a variant thereof), and an LCDR3 comprising the amino acid sequence set forth in SEQ ID NO: 495 (or a variant thereof);
(ac) a HCVR that comprises: an HCDR1 comprising the amino acid sequence set forth in SEQ ID NO: 498 (or a variant thereof), an HCDR2 comprising the amino acid sequence set forth in SEQ ID NO: 499 (or a variant thereof), and an HCDR3 comprising the amino acid sequence set forth in SEQ ID NO: 500 (or a variant thereof); and a LCVR that comprises: an LCDR1 comprising the amino acid sequence set forth in SEQ ID NO: 503 (or a variant thereof), an LCDR2 comprising the amino acid sequence set forth in SEQ ID NO: 504 (or a variant thereof), and an LCDR3 comprising the amino acid sequence set forth in SEQ ID NO: 505 (or a variant thereof);
(ad) a HCVR that comprises: an HCDR1 comprising the amino acid sequence set forth in SEQ ID NO: 508 (or a variant thereof), an HCDR2 comprising the amino acid sequence set forth in SEQ ID NO: 509 (or a variant thereof), and an HCDR3 comprising the amino acid sequence set forth in SEQ ID NO: 510 (or a variant thereof); and a LCVR that comprises: an LCDR1 comprising the amino acid sequence set forth in SEQ ID NO: 513 (or a variant thereof), an LCDR2 comprising the amino acid sequence set forth in SEQ ID NO: 514 (or a variant thereof), and an LCDR3 comprising the amino acid sequence set forth in SEQ ID NO: 515 (or a variant thereof);
(ae) a HCVR that comprises: an HCDR1 comprising the amino acid sequence set forth in SEQ ID NO: 518 (or a variant thereof), an HCDR2 comprising the amino acid sequence set forth in SEQ ID NO: 519 (or a variant thereof), and an HCDR3 comprising the amino acid sequence set forth in SEQ ID NO: 520 (or a variant thereof); and a LCVR that comprises: an LCDR1 comprising the amino acid sequence set forth in SEQ ID NO: 523 (or a variant thereof), an LCDR2 comprising the amino acid sequence set forth in SEQ ID NO: 524 (or a variant thereof), and an LCDR3 comprising the amino acid sequence set forth in SEQ ID NO: 525 (or a variant thereof); and/or
(af) a HCVR that comprises: an HCDR1 comprising the amino acid sequence set forth in SEQ ID NO: 528 (or a variant thereof), an HCDR2 comprising the amino acid sequence set forth in SEQ ID NO: 529 (or a variant thereof), and an HCDR3 comprising the amino acid sequence set forth in SEQ ID NO: 530 (or a variant thereof); and a LCVR that comprises: an LCDR1 comprising the amino acid sequence set forth in SEQ ID NO: 533 (or a variant thereof), an LCDR2 comprising the amino acid sequence set forth in SEQ ID NO: 534 (or a variant thereof), and an LCDR3 comprising the amino acid sequence set forth in SEQ ID NO: 535 (or a variant thereof).

236. The composition of any one of claims 231-235, wherein the anti-TfR antigen binding protein comprises:
(a) a HCVR that comprises: an HCDR1 comprising the amino acid sequence set forth in SEQ ID NO: 438 (or a variant thereof), an HCDR2 comprising the amino acid sequence set forth in SEQ ID NO: 439 (or a variant thereof), and an HCDR3 comprising the amino acid sequence set forth in SEQ ID NO: 440 (or a variant thereof); and a LCVR that comprises: an LCDR1 comprising the amino acid sequence set forth in SEQ ID NO: 443 (or a variant thereof), an LCDR2 comprising the amino acid sequence set forth in SEQ ID NO: 444 (or a variant thereof), and an LCDR3 comprising the amino acid sequence set forth in SEQ ID NO: 445 (or a variant thereof); or
(b) a HCVR that comprises: an HCDR1 comprising the amino acid sequence set forth in SEQ ID NO: 458 (or a variant thereof), an HCDR2 comprising the amino acid sequence set forth in SEQ ID NO: 459 (or a variant thereof), and an HCDR3 comprising the amino acid sequence set forth in SEQ ID NO: 460 (or a variant thereof); and a LCVR that comprises: an LCDR1 comprising the amino acid sequence set forth in SEQ ID NO: 463 (or a variant thereof), an LCDR2 comprising the amino acid sequence set forth in SEQ ID NO: 464 (or a variant thereof), and an LCDR3 comprising the amino acid sequence set forth in SEQ ID NO: 465 (or a variant thereof).

237. The composition of any one of claims 231-236, wherein the anti-TfR antigen binding protein comprises:
(i) a HCVR that comprises the amino acid sequence set forth in SEQ ID NO: 217 (or a variant thereof); and a LCVR that comprises the amino acid sequence set forth in SEQ ID NO: 222 (or a variant thereof);
(ii) a HCVR that comprises the amino acid sequence set forth in SEQ ID NO: 227 (or a variant thereof); and a LCVR that comprises the amino acid sequence set forth in SEQ ID NO: 232 (or a variant thereof);
(iii) a HCVR that comprises the amino acid sequence set forth in SEQ ID NO: 237 (or a variant thereof); and a LCVR that comprises the amino acid sequence set forth in SEQ ID NO: 242 (or a variant thereof);
(iv) a HCVR that comprises the amino acid sequence set forth in SEQ ID NO: 247 (or a variant thereof); and a LCVR that comprises the amino acid sequence set forth in SEQ ID NO: 252 (or a variant thereof);
(v) a HCVR that comprises the amino acid sequence set forth in SEQ ID NO: 257 (or a variant thereof); and a LCVR that comprises the amino acid sequence set forth in SEQ ID NO: 262 (or a variant thereof);
(vi) a HCVR that comprises the amino acid sequence set forth in SEQ ID NO: 267 (or a variant thereof); and a LCVR that comprises the amino acid sequence set forth in SEQ ID NO: 272 (or a variant thereof);
(vii) a HCVR that comprises the amino acid sequence set forth in SEQ ID NO: 277 (or a variant thereof); and a LCVR that comprises the amino acid sequence set forth in SEQ ID NO: 282 (or a variant thereof);
(viii) a HCVR that comprises the amino acid sequence set forth in SEQ ID NO: 287 (or a variant thereof); and a LCVR that comprises the amino acid sequence set forth in SEQ ID NO: 292 (or a variant thereof);
(ix) a HCVR that comprises the amino acid sequence set forth in SEQ ID NO: 297 (or a variant thereof); and a LCVR that comprises the amino acid sequence set forth in SEQ ID NO: 302 (or a variant thereof);
(x) a HCVR that comprises the amino acid sequence set forth in SEQ ID NO: 307 (or a variant thereof); and a LCVR that comprises the amino acid sequence set forth in SEQ ID NO: 312 (or a variant thereof);
(xi) a HCVR that comprises the amino acid sequence set forth in SEQ ID NO: 317 (or a variant thereof); and a LCVR that comprises the amino acid sequence set forth in SEQ ID NO: 322 (or a variant thereof);
(xii) a HCVR that comprises the amino acid sequence set forth in SEQ ID NO: 327 (or a variant thereof); and a LCVR that comprises the amino acid sequence set forth in SEQ ID NO: 332 (or a variant thereof);
(xiii) a HCVR that comprises the amino acid sequence set forth in SEQ ID NO: 337 (or a variant thereof); and a LCVR that comprises the amino acid sequence set forth in SEQ ID NO: 342 (or a variant thereof);
(xiv) a HCVR that comprises the amino acid sequence set forth in SEQ ID NO: 347 (or a variant thereof); and a LCVR that comprises the amino acid sequence set forth in SEQ ID NO: 352 (or a variant thereof);
(xv) a HCVR that comprises the amino acid sequence set forth in SEQ ID NO: 357 (or a variant thereof); and a LCVR that comprises the amino acid sequence set forth in SEQ ID NO: 362 (or a variant thereof);
(xvi) a HCVR that comprises the amino acid sequence set forth in SEQ ID NO: 367 (or a variant thereof); and a LCVR that comprises the amino acid sequence set forth in SEQ ID NO: 372 (or a variant thereof);
(xvii) a HCVR that comprises the amino acid sequence set forth in SEQ ID NO: 377 (or a variant thereof); and a LCVR that comprises the amino acid sequence set forth in SEQ ID NO: 382 (or a variant thereof);
(xviii) a HCVR that comprises the amino acid sequence set forth in SEQ ID NO: 387 (or a variant thereof); and a LCVR that comprises the amino acid sequence set forth in SEQ ID NO: 392 (or a variant thereof);
(xix) a HCVR that comprises the amino acid sequence set forth in SEQ ID NO: 397 (or a variant thereof); and a LCVR that comprises the amino acid sequence set forth in SEQ ID NO: 402 (or a variant thereof);
(xx) a HCVR that comprises the amino acid sequence set forth in SEQ ID NO: 407 (or a variant thereof); and a LCVR that comprises the amino acid sequence set forth in SEQ ID NO: 412 (or a variant thereof);
(xxi) a HCVR that comprises the amino acid sequence set forth in SEQ ID NO: 417 (or a variant thereof); and a LCVR that comprises the amino acid sequence set forth in SEQ ID NO: 422 (or a variant thereof);
(xxii) a HCVR that comprises the amino acid sequence set forth in SEQ ID NO: 427 (or a variant thereof); and a LCVR that comprises the amino acid sequence set forth in SEQ ID NO: 432 (or a variant thereof);
(xxiii) a HCVR that comprises the amino acid sequence set forth in SEQ ID NO: 437 (or a variant thereof); and a LCVR that comprises the amino acid sequence set forth in SEQ ID NO: 442 (or a variant thereof);
(xxiv) a HCVR that comprises the amino acid sequence set forth in SEQ ID NO: 447 (or a variant thereof); and a LCVR that comprises the amino acid sequence set forth in SEQ ID NO: 452 (or a variant thereof);
(xxv) a HCVR that comprises the amino acid sequence set forth in SEQ ID NO: 457 (or a variant thereof); and a LCVR that comprises the amino acid sequence set forth in SEQ ID NO: 462 (or a variant thereof);
(xxvi) a HCVR that comprises the amino acid sequence set forth in SEQ ID NO: 467 (or a variant thereof); and a LCVR that comprises the amino acid sequence set forth in SEQ ID NO: 472 (or a variant thereof);
(xxvii) a HCVR that comprises the amino acid sequence set forth in SEQ ID NO: 477 (or a variant thereof); and a LCVR that comprises the amino acid sequence set forth in SEQ ID NO: 482 (or a variant thereof);
(xxviii) a HCVR that comprises the amino acid sequence set forth in SEQ ID NO: 487 (or a variant thereof); and a LCVR that comprises the amino acid sequence set forth in SEQ ID NO: 492 (or a variant thereof);
(xxix) a HCVR that comprises the amino acid sequence set forth in SEQ ID NO: 497 (or a variant thereof); and a LCVR that comprises the amino acid sequence set forth in SEQ ID NO: 502 (or a variant thereof);
(xxx) a HCVR that comprises the amino acid sequence set forth in SEQ ID NO: 507 (or a variant thereof); and a LCVR that comprises the amino acid sequence set forth in SEQ ID NO: 512 (or a variant thereof);
(xxxi) a HCVR that comprises the amino acid sequence set forth in SEQ ID NO: 517 (or a variant thereof); and a LCVR that comprises the amino acid sequence set forth in SEQ ID NO: 522 (or a variant thereof); and/or
(xxxii) a HCVR that comprises the amino acid sequence set forth in SEQ ID NO: 527 (or a variant thereof); and a LCVR that comprises the amino acid sequence set forth in SEQ ID NO: 532 (or a variant thereof).

238. The composition of any one of claims 231-237, wherein the anti-TfR antigen binding protein comprises:
(i) a HCVR that comprises the amino acid sequence set forth in SEQ ID NO: 437 (or a variant thereof); and a LCVR that comprises the amino acid sequence set forth in SEQ ID NO: 442 (or a variant thereof); or
(ii) a HCVR that comprises the amino acid sequence set forth in SEQ ID NO: 457 (or a variant thereof); and a LCVR that comprises the amino acid sequence set forth in SEQ ID NO: 462 (or a variant thereof).

239. The composition of any one of claims 218-238, wherein the TfR-binding delivery domain comprises an anti-TfR antibody, antibody fragment, or single-chain variable fragment (scFv).

240. The composition of claim 239, wherein the TfR-binding delivery domain is the single-chain variable fragment (scFv), optionally wherein the multidomain therapeutic protein comprises domains arranged in the following orientation: N′-Heavy chain variable region-Light chain variable region-lysosomal alpha-glucosidase-C′ or N′-Light chain variable region-Heavy chain variable region-lysosomal alpha-glucosidase-C′,
optionally wherein the scFv and lysosomal alpha-glucosidase are connected by a peptide linker, and optionally wherein the peptide linker which is -(GGGGS)ₘ- (SEQ ID NO: 600); wherein m is 1, 2, 3, 4, 5, 6, 7, 8, 9, or 10,
optionally wherein the scFv variable regions are connected by a peptide linker, and optionally wherein the peptide linker which is -(GGGGS)ₘ- (SEQ ID NO: 600); wherein m is 1, 2, 3, 4, 5, 6, 7, 8, 9, or 10.

241. The composition of claim 240, wherein the multidomain therapeutic protein comprises a heavy chain variable region (V_{H}) and a light chain variable region (V_{L}), and a lysosomal alpha-glucosidase, wherein the V_{H}, V_{L} and lysosomal alpha-glucosidase are arranged as follows:
(i) V_{L}-V_{L}-lysosomal alpha-glucosidase;
(ii) V_{H}-V_{L}-lysosomal alpha-glucosidase;
(iii) V_{L}-[(GGGGS)₃]-V_{H}-[(GGGGS)₂]-lysosomal alpha-glucosidase; or
(iv) V_{H}-[(GGGGS)₃]-V_{L}-[(GGGGS)₂]-lysosomal alpha-glucosidase.

242. The composition of claim 240 or 241, wherein the scFv comprises the sequence set forth in any one of SEQ ID NOS: 540, 549, 551, and 554,
optionally wherein the scFv comprises the sequence set forth in SEQ ID NO: 554.

243. The composition of any one of claims 240-242, wherein the scFv consists of the sequence set forth in any one of SEQ ID NOS: 540, 549, 551, and 554,
optionally wherein the scFv consists of the sequence set forth in SEQ ID NOS: 554.

244. The composition of any one of claims 218-243, wherein the scFv coding sequence is at least 90%, at least 91%, at least 92%, at least 93%, at least 94%, at least 95%, at least 96%, at least 97%, at least 98%, or at least 99% identical to any one of SEQ ID NOS: 587-599,
optionally wherein the scFv coding sequence is at least 90%, at least 91%, at least 92%, at least 93%, at least 94%, at least 95%, at least 96%, at least 97%, at least 98%, or at least 99% identical to any one of SEQ ID NOS: 593-595,
optionally wherein the scFv coding sequence is at least 90%, at least 91%, at least 92%, at least 93%, at least 94%, at least 95%, at least 96%, at least 97%, at least 98%, or at least 99% identical to SEQ ID NO: 593.

245. The composition of any one of claims 218-244, wherein the scFv coding sequence is at least 90%, at least 91%, at least 92%, at least 93%, at least 94%, at least 95%, at least 96%, at least 97%, at least 98%, or at least 99% identical to any one of SEQ ID NOS: 587-599 and encodes an scFv comprising any one of SEQ ID NOS: 540, 549, 551, and 554,
optionally wherein the scFv coding sequence is at least 90%, at least 91%, at least 92%, at least 93%, at least 94%, at least 95%, at least 96%, at least 97%, at least 98%, or at least 99% identical to any one of SEQ ID NOS: 593-595 and encodes an scFv comprising SEQ ID NO: 554,
optionally wherein the scFv coding sequence is at least 90%, at least 91%, at least 92%, at least 93%, at least 94%, at least 95%, at least 96%, at least 97%, at least 98%, or at least 99% identical to SEQ ID NO: 593 and encodes an scFv comprising SEQ ID NO: 554.

246. The composition of any one of claims 218-245, wherein the scFv coding sequence is at least 90%, at least 91%, at least 92%, at least 93%, at least 94%, at least 95%, at least 96%, at least 97%, at least 98%, or at least 99% identical to any one of SEQ ID NOS: 587-599, is codon-optimized and CpG-depleted, and encodes an scFv comprising any one of SEQ ID NOS: 540, 549, 551, and 554,
optionally wherein the scFv coding sequence is at least 90%, at least 91%, at least 92%, at least 93%, at least 94%, at least 95%, at least 96%, at least 97%, at least 98%, or at least 99% identical to any one of SEQ ID NOS: 593-595, is codon-optimized and CpG-depleted, and encodes an scFv comprising SEQ ID NO: 554,
optionally wherein the scFv coding sequence is at least 90%, at least 91%, at least 92%, at least 93%, at least 94%, at least 95%, at least 96%, at least 97%, at least 98%, or at least 99% identical to SEQ ID NO: 593, the scFv coding sequence is codon-optimized and CpG-depleted, and encodes an scFv comprising SEQ ID NO: 554.

247. The composition of any one of claims 218-246, wherein the scFv coding sequence comprises the sequence set forth in any one of SEQ ID NOS: 587-599,
optionally wherein the scFv coding sequence comprises the sequence set forth in any one of SEQ ID NOS: 593-595,
optionally wherein the scFv coding sequence comprises the sequence set forth in SEQ ID NO: 593.

248. The composition of any one of claims 218-247, wherein the scFv coding sequence consists of the sequence set forth in any one of SEQ ID NOS: 587-599,
optionally wherein the scFv coding sequence consists of the sequence set forth in any one of SEQ ID NOS: 593-595,
optionally wherein the scFv coding sequence consists of the sequence set forth in SEQ ID NO: 593.

249. The composition of any one of claims 218-248, wherein the coding sequence for the multidomain therapeutic protein is codon-optimized or CpG-depleted.

250. The composition of any one of claims 218-249, wherein the coding sequence for the multidomain therapeutic protein is codon-optimized and CpG-depleted.

251. The composition of any one of claims 218-250, wherein the multidomain therapeutic protein comprises the sequence set forth in any one of SEQ ID NOS: 570-573,
optionally wherein the multidomain therapeutic protein comprises the sequence set forth in SEQ ID NO: 573.

252. The composition of any one of claims 218-251, wherein the multidomain therapeutic protein consists of the sequence set forth in any one of SEQ ID NOS: 570-573,
optionally wherein the multidomain therapeutic protein consists of the sequence set forth in SEQ ID NO: 573.

253. The composition of any one of claims 218-252, wherein the coding sequence for the multidomain therapeutic protein is at least 90%, at least 91%, at least 92%, at least 93%, at least 94%, at least 95%, at least 96%, at least 97%, at least 98%, or at least 99% identical to any one of SEQ ID NOS: 574-586,
optionally wherein the coding sequence for the multidomain therapeutic protein is at least 90%, at least 91%, at least 92%, at least 93%, at least 94%, at least 95%, at least 96%, at least 97%, at least 98%, or at least 99% identical to any one of SEQ ID NOS: 584-586,
optionally wherein the coding sequence for the multidomain therapeutic protein is at least 90%, at least 91%, at least 92%, at least 93%, at least 94%, at least 95%, at least 96%, at least 97%, at least 98%, or at least 99% identical to SEQ ID NO: 584,
optionally wherein the nucleic acid construct comprises a sequence at least 90%, at least 91%, at least 92%, at least 93%, at least 94%, at least 95%, at least 96%, at least 97%, at least 98%, or at least 99% identical to SEQ ID NO: 733.

254. The composition of any one of claims 218-253, wherein the coding sequence for the multidomain therapeutic protein is at least 90%, at least 91%, at least 92%, at least 93%, at least 94%, at least 95%, at least 96%, at least 97%, at least 98%, or at least 99% identical to any one of SEQ ID NOS: 574-586, and the multidomain therapeutic protein comprises the sequence set forth in any one of SEQ ID NOS: 570-573,
optionally wherein the coding sequence for the multidomain therapeutic protein is at least 90%, at least 91%, at least 92%, at least 93%, at least 94%, at least 95%, at least 96%, at least 97%, at least 98%, or at least 99% identical to any one of SEQ ID NOS: 584-586, and the multidomain therapeutic protein comprises the sequence set forth in SEQ ID NO: 573,
optionally wherein the coding sequence for the multidomain therapeutic protein is at least 90%, at least 91%, at least 92%, at least 93%, at least 94%, at least 95%, at least 96%, at least 97%, at least 98%, or at least 99% identical to SEQ ID NO: 584, and the multidomain therapeutic protein comprises the sequence set forth in SEQ ID NO: 573,
optionally wherein the nucleic acid construct comprises a sequence at least 90%, at least 91%, at least 92%, at least 93%, at least 94%, at least 95%, at least 96%, at least 97%, at least 98%, or at least 99% identical to SEQ ID NO: 733, and the multidomain therapeutic protein comprises the sequence set forth in SEQ ID NO: 573.

255. The composition of any one of claims 218-254, wherein the coding sequence for the multidomain therapeutic protein is at least 90%, at least 91%, at least 92%, at least 93%, at least 94%, at least 95%, at least 96%, at least 97%, at least 98%, or at least 99% identical to any one of SEQ ID NOS: 574-586 and is codon-optimized and CpG-depleted, and the multidomain therapeutic protein comprises the sequence set forth in any one of SEQ ID NOS: 570-573,
optionally wherein the coding sequence for the multidomain therapeutic protein is at least 90%, at least 91%, at least 92%, at least 93%, at least 94%, at least 95%, at least 96%, at least 97%, at least 98%, or at least 99% identical to any one of SEQ ID NOS: 584-586 and is codon-optimized and CpG-depleted, and the multidomain therapeutic protein comprises the sequence set forth in SEQ ID NO: 573,
optionally wherein the coding sequence for the multidomain therapeutic protein is at least 90%, at least 91%, at least 92%, at least 93%, at least 94%, at least 95%, at least 96%, at least 97%, at least 98%, or at least 99% identical to SEQ ID NO: 584, the coding sequence for the multidomain therapeutic protein is codon-optimized and CpG-depleted, and the multidomain therapeutic protein comprises the sequence set forth in SEQ ID NO: 573,
optionally wherein the nucleic acid construct comprises a sequence at least 90%, at least 91%, at least 92%, at least 93%, at least 94%, at least 95%, at least 96%, at least 97%, at least 98%, or at least 99% identical to SEQ ID NO: 733, the coding sequence for the multidomain therapeutic protein is codon-optimized and CpG-depleted, and the multidomain therapeutic protein comprises the sequence set forth in SEQ ID NO: 573.

256. The composition of any one of claims 218-255, wherein the coding sequence for the multidomain therapeutic protein comprises the sequence set forth in any one of SEQ ID NOS: 574-586,
optionally wherein the coding sequence for the multidomain therapeutic protein comprises the sequence set forth in any one of SEQ ID NOS: 584-586,
optionally wherein the coding sequence for the multidomain therapeutic protein comprises the sequence set forth in SEQ ID NO: 584,
optionally wherein the nucleic acid construct comprises the sequence set forth in SEQ ID NO: 733.

257. The composition of any one of claims 218-256, wherein the coding sequence for the multidomain therapeutic protein consists of the sequence set forth in any one of SEQ ID NOS: 574-586,
optionally wherein the coding sequence for the multidomain therapeutic protein consists of the sequence set forth in any one of SEQ ID NOS: 584-586,
optionally wherein the coding sequence for the multidomain therapeutic protein consists of the sequence set forth in SEQ ID NO: 584,
optionally wherein the nucleic acid construct comprises the sequence set forth in SEQ ID NO: 733.

258. The composition of any one of claims 218-257, wherein the nucleic acid construct comprises a splice acceptor upstream of the coding sequence for the multidomain therapeutic protein.

259. The composition of any one of claims 218-258, wherein the nucleic acid construct comprises a polyadenylation signal or sequence downstream of the coding sequence for the multidomain therapeutic protein.

260. The composition of any one of claims 218-259, wherein the nucleic acid construct comprises a splice acceptor upstream of the coding sequence for the multidomain therapeutic protein, and the nucleic acid construct comprises a polyadenylation signal or sequence downstream of the coding sequence for the multidomain therapeutic protein.

261. The composition of any one of claims 218-260, wherein the nucleic acid construct does not comprise a homology arm.

262. The composition of any one of claims 218-260, wherein the nucleic acid construct comprises homology arms.

263. The composition of any one of claims 218-262, wherein the nucleic acid construct does not comprise a promoter that drives the expression of the multidomain therapeutic protein.

264. The composition of any one of claims 218-262, wherein the coding sequence for the multidomain therapeutic protein is operably linked to a promoter, optionally wherein the promoter is a liver-specific promoter.

265. The composition of any one of claims 218-264, wherein the nucleic acid construct is single-stranded DNA or double-stranded DNA, optionally wherein the nucleic acid construct is single-stranded DNA.

266. The composition of any one of claims 218-265, wherein the nucleic acid construct comprises from 5′ to 3′: a splice acceptor, the coding sequence for the multidomain therapeutic protein, and a polyadenylation signal or sequence,
wherein the lysosomal alpha-glucosidase coding sequence comprises the sequence set forth in any one of SEQ ID NOS: 174-182 and 205-212, optionally wherein the lysosomal alpha-glucosidase coding sequence comprises the sequence set forth in SEQ ID NO: 176, optionally wherein the coding sequence for the multidomain therapeutic protein comprises the sequence set forth in any one of SEQ ID NOS: 574-586, and optionally wherein the coding sequence for the multidomain therapeutic protein comprises the sequence set forth in any one of SEQ ID NOS: 584-586, optionally wherein the coding sequence for the multidomain therapeutic protein comprises the sequence set forth in SEQ ID NO: 584, optionally wherein the nucleic acid construct comprises the sequence set forth in SEQ ID NO: 733,
wherein the nucleic acid construct does not comprise a promoter that drives the expression of the multidomain therapeutic protein, and
wherein the nucleic acid construct does not comprise a homology arm.

267. The composition of any one of claims 218-266, wherein the nucleic acid construct is in a nucleic acid vector or a lipid nanoparticle.

268. The composition of claim 267, wherein the nucleic acid construct is in the nucleic acid vector.

269. The composition of claim 268, wherein the nucleic acid vector is a viral vector.

270. The composition of claim 267 or 268, wherein the nucleic acid vector is an adeno-associated viral (AAV) vector,
optionally wherein the nucleic acid construct is flanked by inverted terminal repeats (ITRs) on each end, optionally wherein the ITR on at least one end comprises, consists essentially of, or consists of SEQ ID NO: 160, and optionally wherein the ITR on each end comprises, consists essentially of, or consists of SEQ ID NO: 160.

271. The composition of claim 270, wherein the AAV vector is a single-stranded AAV (ssAAV) vector.

272. The composition of claim 270 or 271, wherein the AAV vector is derived from an AAV8 vector, an AAV3B vector, an AAV5 vector, an AAV6 vector, an AAV7 vector, an AAV9 vector, an AAVrh.74 vector, or an AAVhu.37 vector.

273. The composition of claim 272, wherein the AAV vector is a recombinant AAV8 (rAAV8) vector.

274. The composition of claim 273, wherein the AAV vector is a single-stranded rAAV8 vector.

275. The composition of any one of claims 218-274, wherein the nucleic acid construct comprises from 5′ to 3′: a splice acceptor, the coding sequence for the multidomain therapeutic protein, and a polyadenylation signal or sequence,
wherein the lysosomal alpha-glucosidase coding sequence comprises the sequence set forth in any one of SEQ ID NOS: 174-182 and 205-212, optionally wherein the lysosomal alpha-glucosidase coding sequence comprises the sequence set forth in SEQ ID NO: 176, optionally wherein the coding sequence for the multidomain therapeutic protein comprises the sequence set forth in any one of SEQ ID NOS: 574-586, and optionally wherein the coding sequence for the multidomain therapeutic protein comprises the sequence set forth in any one of SEQ ID NOS: 584-586, optionally wherein the coding sequence for the multidomain therapeutic protein comprises the sequence set forth in SEQ ID NO: 584, optionally wherein the nucleic acid construct comprises the sequence set forth in SEQ ID NO: 733,
wherein the nucleic acid construct does not comprise a promoter that drives the expression of the multidomain therapeutic protein,
wherein the nucleic acid construct does not comprise a homology arm, and
wherein the nucleic acid construct is in a single-stranded rAAV8 vector, optionally wherein the nucleic acid construct is flanked by inverted terminal repeats (ITRs) on each end, optionally wherein the ITR on at least one end comprises, consists essentially of, or consists of SEQ ID NO: 160, and optionally wherein the ITR on each end comprises, consists essentially of, or consists of SEQ ID NO: 160.

276. The composition of any one of claims 218-275, wherein the nucleic acid construct is CpG-depleted.

277. The composition of any one of claims 218-276, further comprising a nuclease agent that targets a nuclease target site in a target genomic locus.

278. The composition of claim 277, wherein the target genomic locus is an albumin gene, optionally wherein the albumin gene is a human albumin gene.

279. The composition of claim 278, wherein the nuclease target site is in intron 1 of the albumin gene.

280. The composition of any one of claims 277-279, wherein the nuclease agent comprises:
(a) a zinc finger nuclease (ZFN);
(b) a transcription activator-like effector nuclease (TALEN); or
(c) (i) a Cas protein or a nucleic acid encoding the Cas protein; and
(ii) a guide RNA or one or more DNAs encoding the guide RNA, wherein the guide RNA comprises a DNA-targeting segment that targets a guide RNA target sequence, and wherein the guide RNA binds to the Cas protein and targets the Cas protein to the guide RNA target sequence.

281. The composition of any one of claims 277-279, wherein the nuclease agent comprises:
(a) a Cas protein or a nucleic acid encoding the Cas protein; and
(b) a guide RNA or one or more DNAs encoding the guide RNA, wherein the guide RNA comprises a DNA-targeting segment that targets a guide RNA target sequence, and wherein the guide RNA binds to the Cas protein and targets the Cas protein to the guide RNA target sequence.

282. The composition of claim 281, wherein the guide RNA target sequence is in intron 1 of an albumin gene.

283. The composition of claim 282, wherein the albumin gene is a human albumin gene.

284. The composition of any one of claims 281-283, wherein:
(I) the DNA-targeting segment comprises at least 17, at least 18, at least 19, or at least 20 contiguous nucleotides of the sequence set forth in any one of SEQ ID NOS: 30-61, optionally wherein the DNA-targeting segment comprises at least 17, at least 18, at least 19, or at least 20 contiguous nucleotides of the sequence set forth in any one of SEQ ID NOS: 36, 30, 33, and 41; and/or
(II) the DNA-targeting segment is at least 90% or at least 95% identical to the sequence set forth in any one of SEQ ID NOS: 30-61, optionally wherein the DNA-targeting segment is at least 90% or at least 95% identical to the sequence set forth in any one of SEQ ID NOS: 36, 30, 33, and 41.

285. The composition of any one of claims 281-284, wherein the DNA-targeting segment comprises any one of SEQ ID NOS: 30-61, optionally wherein the DNA-targeting segment comprises any one of SEQ ID NOS: 36, 30, 33, and 41.

286. The composition of any one of claims 281-285, wherein the DNA-targeting segment consists of any one of SEQ ID NOS: 30-61, optionally wherein the DNA-targeting segment consists of any one of SEQ ID NOS: 36, 30, 33, and 41.

287. The composition of any one of claims 281-286, wherein the guide RNA comprises any one of SEQ ID NOS: 62-125, optionally wherein the guide RNA comprises any one of SEQ ID NOS: 68, 100, 62, 94, 65, 97, 73, and 105.

288. The composition of any one of claims 281-287, wherein:
(I) the DNA-targeting segment comprises at least 17, at least 18, at least 19, or at least 20 contiguous nucleotides of SEQ ID NO: 36; and/or
(II) the DNA-targeting segment is at least 90% or at least 95% identical to SEQ ID NO: 36.

289. The composition of any one of claims 281-288, wherein the DNA-targeting segment comprises SEQ ID NO: 36.

290. The composition of any one of claims 281-289, wherein the DNA-targeting segment consists of SEQ ID NO: 36.

291. The composition of any one of claims 281-290, wherein the guide RNA comprises SEQ ID NO: 68 or 100.

292. The composition of any one of claims 281-291, wherein the guide RNA in the form of RNA.

293. The composition of any one of claims 281-292, wherein the guide RNA comprises at least one modification.

294. The composition of claim 293, wherein the at least one modification comprises a 2′-O-methyl-modified nucleotide.

295. The composition of claim 293 or 294, wherein the at least one modification comprises a phosphorothioate bond between nucleotides.

296. The composition of any one of claims 293-295, wherein the at least one modification comprises a modification at one or more of the first five nucleotides at the 5′ end of the guide RNA.

297. The composition of any one of claims 293-296, wherein the at least one modification comprises a modification at one or more of the last five nucleotides at the 3′ end of the guide RNA.

298. The composition of any one of claims 293-297, wherein the at least one modification comprises phosphorothioate bonds between the first four nucleotides at the 5′ end of the guide RNA.

299. The composition of any one of claims 293-298, wherein the at least one modification comprises phosphorothioate bonds between the last four nucleotides at the 3′ end of the guide RNA.

300. The composition of any one of claims 293-299, wherein the at least one modification comprises 2′-O-methyl-modified nucleotides at the first three nucleotides at the 5′ end of the guide RNA.

301. The composition of any one of claims 293-300, wherein the at least one modification comprises 2′-O-methyl-modified nucleotides at the last three nucleotides at the 3′ end of the guide RNA.

302. The composition of any one of claims 293-301, wherein the at least one modification comprises: (i) phosphorothioate bonds between the first four nucleotides at the 5′ end of the guide RNA; (ii) phosphorothioate bonds between the last four nucleotides at the 3′ end of the guide RNA; (iii) 2′-O-methyl-modified nucleotides at the first three nucleotides at the 5′ end of the guide RNA; and (iv) 2′-O-methyl-modified nucleotides at the last three nucleotides at the 3′ end of the guide RNA.

303. The composition of any one of claims 281-302, wherein the guide RNA is a single guide RNA (sgRNA).

304. The composition of any one of claims 281-303, wherein the guide RNA in the form of RNA, the guide RNA comprises SEQ ID NO: 100, and the guide RNA comprises: (i) phosphorothioate bonds between the first four nucleotides at the 5′ end of the guide RNA; (ii) phosphorothioate bonds between the last four nucleotides at the 3′ end of the guide RNA; (iii) 2′-O-methyl-modified nucleotides at the first three nucleotides at the 5′ end of the guide RNA; and (iv) 2′-O-methyl-modified nucleotides at the last three nucleotides at the 3′ end of the guide RNA.

305. The composition of any one of claims 281-304, wherein the Cas protein is a Cas9 protein.

306. The composition of claim 305, wherein the Cas9 protein is derived from a Streptococcus pyogenes Cas9 protein, a Staphylococcus aureus Cas9 protein, a Campylobacter jejuni Cas9 protein, a Streptococcus thermophilus Cas9 protein, or a Neisseria meningitidis Cas9 protein.

307. The composition of claim 305, wherein the Cas protein is derived from a Streptococcus pyogenes Cas9 protein.

308. The composition of any one of claims 281-307, wherein the Cas protein comprises the sequence set forth in SEQ ID NO: 11.

309. The composition of any one of claims 281-308, wherein the nucleic acid encoding the Cas protein is codon-optimized for expression in a mammalian cell or a human cell.

310. The composition of any one of claims 281-309, wherein the composition comprises the nucleic acid encoding the Cas protein, wherein the nucleic acid comprises an mRNA encoding the Cas protein.

311. The composition of claim 310, wherein the mRNA encoding the Cas protein comprises at least one modification.

312. The composition of claim 310 or 311, wherein the mRNA encoding the Cas protein is modified to comprise a modified uridine at one or more or all uridine positions.

313. The composition of claim 312, wherein the modified uridine is pseudouridine or N1-methyl-pseudouridine, optionally N1-methyl-pseudouridine.

314. The composition of claim 312 or 313, wherein the mRNA encoding the Cas protein is fully substituted with pseudouridine or N1-methyl-pseudouridine, optionally N1-methyl-pseudouridine.

315. The composition of any one of claims 310-314, wherein the mRNA encoding the Cas protein comprises a 5′ cap.

316. The composition of any one of claims 310-315, wherein the mRNA encoding the Cas protein comprises a polyadenylation sequence.

317. The composition of any one of claims 310-316, wherein the mRNA encoding the Cas protein comprises the sequence set forth in SEQ ID NO: 226, 225, or 12.

318. The composition of any one of claims 281-317, wherein the composition comprises the nucleic acid encoding the Cas protein, wherein the nucleic acid comprises an mRNA encoding the Cas protein, the mRNA encoding the Cas protein comprises the sequence set forth in SEQ ID NO: 226, 225, or 12, and the mRNA encoding the Cas protein is fully substituted with pseudouridine or N1-methyl-pseudouridine, optionally N1-methyl-pseudouridine, comprises a 5′ cap, and comprises a polyadenylation sequence.

319. The composition of any one of claims 281-318, wherein the guide RNA in the form of RNA, and the guide RNA comprises SEQ ID NO: 68 or 100, and
wherein the composition comprises the nucleic acid encoding the Cas protein, wherein the nucleic acid comprises an mRNA encoding the Cas protein, and the mRNA encoding the Cas protein comprises the sequence set forth in SEQ ID NO: 226, 225, or 12.

320. The composition of claim 319, wherein the nucleic acid construct comprises from 5′ to 3′: a splice acceptor, the coding sequence for the multidomain therapeutic protein, and a polyadenylation signal or sequence,
wherein the lysosomal alpha-glucosidase coding sequence comprises the sequence set forth in any one of SEQ ID NOS: 174-182 and 205-212, optionally wherein the lysosomal alpha-glucosidase coding sequence comprises the sequence set forth in SEQ ID NO: 176, optionally wherein the coding sequence for the multidomain therapeutic protein comprises the sequence set forth in any one of SEQ ID NOS: 574-586, and optionally wherein the coding sequence for the multidomain therapeutic protein comprises the sequence set forth in any one of SEQ ID NOS: 584-586, optionally wherein the coding sequence for the multidomain therapeutic protein comprises the sequence set forth in SEQ ID NO: 584, optionally wherein the nucleic acid construct comprises the sequence set forth in SEQ ID NO: 733,
wherein the nucleic acid construct does not comprise a promoter that drives the expression of the multidomain therapeutic protein,
wherein the nucleic acid construct does not comprise a homology arm, and
wherein the nucleic acid construct is in a single-stranded rAAV8 vector, optionally wherein the nucleic acid construct is flanked by inverted terminal repeats (ITRs) on each end, optionally wherein the ITR on at least one end comprises, consists essentially of, or consists of SEQ ID NO: 160, and optionally wherein the ITR on each end comprises, consists essentially of, or consists of SEQ ID NO: 160.

321. The composition of any one of claims 281-318, wherein the guide RNA in the form of RNA, the guide RNA comprises SEQ ID NO: 100, and the guide RNA comprises: (i) phosphorothioate bonds between the first four nucleotides at the 5′ end of the guide RNA; (ii) phosphorothioate bonds between the last four nucleotides at the 3′ end of the guide RNA; (iii) 2′-O-methyl-modified nucleotides at the first three nucleotides at the 5′ end of the guide RNA; and (iv) 2′-O-methyl-modified nucleotides at the last three nucleotides at the 3′ end of the guide RNA, and
wherein the composition comprises the nucleic acid encoding the Cas protein, wherein the nucleic acid comprises an mRNA encoding the Cas protein, the mRNA encoding the Cas protein comprises the sequence set forth in SEQ ID NO: 226, 225, or 12, and the mRNA encoding the Cas protein is fully substituted with pseudouridine or N1-methyl-pseudouridine, optionally N1-methyl-pseudouridine, comprises a 5′ cap, and comprises a polyadenylation sequence.

322. The composition of claim 321, wherein the nucleic acid construct comprises from 5′ to 3′: a splice acceptor, the coding sequence for the multidomain therapeutic protein, and a polyadenylation signal or sequence,
wherein the lysosomal alpha-glucosidase coding sequence comprises the sequence set forth in any one of SEQ ID NOS: 174-182 and 205-212, optionally wherein the lysosomal alpha-glucosidase coding sequence comprises the sequence set forth in SEQ ID NO: 176, optionally wherein the coding sequence for the multidomain therapeutic protein comprises the sequence set forth in any one of SEQ ID NOS: 574-586, and optionally wherein the coding sequence for the multidomain therapeutic protein comprises the sequence set forth in any one of SEQ ID NOS: 584-586, optionally wherein the coding sequence for the multidomain therapeutic protein comprises the sequence set forth in SEQ ID NO: 584, optionally wherein the nucleic acid construct comprises the sequence set forth in SEQ ID NO: 733,
wherein the nucleic acid construct does not comprise a promoter that drives the expression of the multidomain therapeutic protein,
wherein the nucleic acid construct does not comprise a homology arm, and
wherein the nucleic acid construct is in a single-stranded rAAV8 vector, optionally wherein the nucleic acid construct is flanked by inverted terminal repeats (ITRs) on each end, optionally wherein the ITR on at least one end comprises, consists essentially of, or consists of SEQ ID NO: 160, and optionally wherein the ITR on each end comprises, consists essentially of, or consists of SEQ ID NO: 160.

323. The composition of any one of claims 281-322, wherein the Cas protein or the nucleic acid encoding the Cas protein and the guide RNA or the one or more DNAs encoding the guide RNA are associated with a lipid nanoparticle.

324. The composition of claim 323, wherein the lipid nanoparticle comprises a cationic lipid, a neutral lipid, a helper lipid, and a stealth lipid.

325. The composition of claim 324, wherein the cationic lipid is Lipid A ((9Z,12Z)-3-((4,4-bis(octyloxy)butanoyl)oxy)-2-((((3-(diethylamino)propoxy)carbonyl)oxy)methyl)propyl octadeca-9,12-dienoate).

326. The composition of claim 324 or 325, wherein the neutral lipid is distearoylphosphatidylcholine or 1,2-distearoyl-sn-glycero-3-phosphocholine (DSPC).

327. The composition of any one of claims 324-326, wherein the helper lipid is cholesterol.

328. The composition of any one of claims 324-327, wherein the stealth lipid is 1,2-dimyristoyl-rac-glycero-3-methoxypolyethylene glycol-2000 (PEG2k-DMG).

329. The composition of any one of claims 324-328, wherein the cationic lipid is Lipid A, the neutral lipid is DSPC, the helper lipid is cholesterol, and the stealth lipid is PEG2k-DMG.

330. The composition of any one of claims 323-329, wherein the lipid nanoparticle comprises four lipids at the following molar ratios: about 50 mol% Lipid A, about 9 mol% DSPC, about 38 mol% cholesterol, and about 3 mol% PEG2k-DMG.

331. The composition of any one of claims 281-330, wherein the albumin gene is a human albumin gene,
wherein the guide RNA in the form of RNA, and the guide RNA comprises SEQ ID NO: 68 or 100,
wherein the composition comprises the nucleic acid encoding the Cas protein, wherein the nucleic acid comprises an mRNA encoding the Cas protein, and the mRNA encoding the Cas protein comprises the sequence set forth in SEQ ID NO: 226, 225, or 12, and
wherein the guide RNA and the mRNA encoding the Cas protein are associated with a lipid nanoparticle comprising Lipid A, DSPC, cholesterol, and PEG2k-DMG, optionally at the following molar ratios: about 50 mol% Lipid A, about 9 mol% DSPC, about 38 mol% cholesterol, and about 3 mol% PEG2k-DMG.

332. The composition of claim 331, wherein the nucleic acid construct comprises from 5′ to 3′: a splice acceptor, the coding sequence for the multidomain therapeutic protein, and a polyadenylation signal or sequence,
wherein the lysosomal alpha-glucosidase coding sequence comprises the sequence set forth in any one of SEQ ID NOS: 174-182 and 205-212, optionally wherein the lysosomal alpha-glucosidase coding sequence comprises the sequence set forth in SEQ ID NO: 176, optionally wherein the coding sequence for the multidomain therapeutic protein comprises the sequence set forth in any one of SEQ ID NOS: 574-586, and optionally wherein the coding sequence for the multidomain therapeutic protein comprises the sequence set forth in any one of SEQ ID NOS: 584-586, optionally wherein the coding sequence for the multidomain therapeutic protein comprises the sequence set forth in SEQ ID NO: 584, optionally wherein the nucleic acid construct comprises the sequence set forth in SEQ ID NO: 733,
wherein the nucleic acid construct does not comprise a promoter that drives the expression of the multidomain therapeutic protein,
wherein the nucleic acid construct does not comprise a homology arm, and
wherein the nucleic acid construct is in a single-stranded rAAV8 vector, optionally wherein the nucleic acid construct is flanked by inverted terminal repeats (ITRs) on each end, optionally wherein the ITR on at least one end comprises, consists essentially of, or consists of SEQ ID NO: 160, and optionally wherein the ITR on each end comprises, consists essentially of, or consists of SEQ ID NO: 160.

333. The composition of any one of claims 281-330, wherein the albumin gene is a human albumin gene,
wherein the guide RNA in the form of RNA, the guide RNA comprises SEQ ID NO: 100, and the guide RNA comprises: (i) phosphorothioate bonds between the first four nucleotides at the 5′ end of the guide RNA; (ii) phosphorothioate bonds between the last four nucleotides at the 3′ end of the guide RNA; (iii) 2′-O-methyl-modified nucleotides at the first three nucleotides at the 5′ end of the guide RNA; and (iv) 2′-O-methyl-modified nucleotides at the last three nucleotides at the 3′ end of the guide RNA,
wherein the composition comprises the nucleic acid encoding the Cas protein, wherein the nucleic acid comprises an mRNA encoding the Cas protein, the mRNA encoding the Cas protein comprises the sequence set forth in SEQ ID NO: 226, 225, or 12, and the mRNA encoding the Cas protein is fully substituted with pseudouridine or N1-methyl-pseudouridine, optionally N1-methyl-pseudouridine, comprises a 5′ cap, and comprises a polyadenylation sequence, and
wherein the guide RNA and the mRNA encoding the Cas protein are associated with a lipid nanoparticle comprising Lipid A, DSPC, cholesterol, and PEG2k-DMG, optionally at the following molar ratios: about 50 mol% Lipid A, about 9 mol% DSPC, about 38 mol% cholesterol, and about 3 mol% PEG2k-DMG.

334. The composition of claim 333, wherein the nucleic acid construct comprises from 5′ to 3′: a splice acceptor, the coding sequence for the multidomain therapeutic protein, and a polyadenylation signal or sequence,
wherein the lysosomal alpha-glucosidase coding sequence comprises the sequence set forth in any one of SEQ ID NOS: 174-182 and 205-212, optionally wherein the lysosomal alpha-glucosidase coding sequence comprises the sequence set forth in SEQ ID NO: 176, optionally wherein the coding sequence for the multidomain therapeutic protein comprises the sequence set forth in any one of SEQ ID NOS: 574-586, and optionally wherein the coding sequence for the multidomain therapeutic protein comprises the sequence set forth in any one of SEQ ID NOS: 584-586, optionally wherein the coding sequence for the multidomain therapeutic protein comprises the sequence set forth in SEQ ID NO: 584, optionally wherein the nucleic acid construct comprises the sequence set forth in SEQ ID NO: 733,
wherein the nucleic acid construct does not comprise a promoter that drives the expression of the multidomain therapeutic protein,
wherein the nucleic acid construct does not comprise a homology arm, and
wherein the nucleic acid construct is in a single-stranded rAAV8 vector, optionally wherein the nucleic acid construct is flanked by inverted terminal repeats (ITRs) on each end, optionally wherein the ITR on at least one end comprises, consists essentially of, or consists of SEQ ID NO: 160, and optionally wherein the ITR on each end comprises, consists essentially of, or consists of SEQ ID NO: 160.

335. The composition of any one of claims 218-334, for use in a method of inserting the nucleic acid encoding the multidomain therapeutic protein into a target genomic locus in a cell or a population of cells.

336. The composition of any one of claims 218-334, for use in a method of expressing the multidomain therapeutic protein from a target genomic locus in a cell or a population of cells or for use in a method of expressing the multidomain therapeutic protein in a cell or a population of cells.

337. The composition of any one of claims 218-334, for use in a method of inserting the nucleic acid encoding the multidomain therapeutic protein into a target genomic locus in a cell or a population of cells in a subject.

338. The composition of any one of claims 218-334, for use in a method of expressing the multidomain therapeutic protein from a target genomic locus in a cell or a population of cells in a subject or for use in a method of expressing the multidomain therapeutic protein in a cell or a population of cells in a subject.

339. The composition of any one of claims 218-334, for use in a method of treating a lysosomal alpha-glucosidase deficiency in a subject in need thereof.

340. The composition of any one of claims 218-334, for use in a method of reducing glycogen accumulation in a tissue in a subject in need thereof.

341. The composition of any one of claims 218-334, for use in a method of treating Pompe disease in a subject in need thereof.

342. The composition of any one of claims 218-334, for use in a method of preventing or reducing the onset of a sign or symptom of Pompe disease in a neonatal subject in need thereof.

343. A cell comprising the composition of any one of claims 218-334.

344. The cell of claim 343, wherein the nucleic acid construct is integrated into a target genomic locus, and wherein the multidomain therapeutic protein is expressed from the target genomic locus, or wherein the nucleic acid construct is integrated into intron 1 of an endogenous albumin locus, and wherein the multidomain therapeutic protein is expressed from the endogenous albumin locus.

345. The cell of claim 343 or 344, wherein the cell is a liver cell.

346. The cell of any one of claims 343-345, wherein the liver cell is a hepatocyte.

347. The cell of any one of claims 343-346, wherein the cell is a human cell.

348. The cell of any one of claims 343-347, wherein the cell is a neonatal cell.

349. The cell of claim 348, wherein the neonatal cell is from a human neonatal subject within 24 weeks after birth.

350. The cell of claim 348, wherein the neonatal cell is from a human neonatal subject within 12 weeks after birth.

351. The cell of claim 348, wherein the neonatal cell is from a human neonatal subject within 8 weeks after birth.

352. The cell of claim 348, wherein the neonatal cell is from a human neonatal subject within 4 weeks after birth.

353. The cell of any one of claims 343-347, wherein the cell is not a neonatal cell.

354. The cell of any one of claims 343-353, wherein the cell is in vivo.

355. The cell of any one of claims 343-353, wherein the cell is in vitro or ex vivo.

356. A method of inserting a nucleic acid encoding a multidomain therapeutic protein comprising a TfR-binding delivery domain fused to a lysosomal alpha-glucosidase into a target genomic locus in a cell or a population of cells, comprising administering to the cell or the population of cells the composition of any one of claims 277-334,
wherein the nuclease agent cleaves the nuclease target site in the target genomic locus, and the nucleic acid construct is inserted into the target genomic locus.

357. A method of expressing a multidomain therapeutic protein comprising a TfR-binding delivery domain fused to a lysosomal alpha-glucosidase in a cell or a population of cells, comprising administering to the cell or the population of cells the composition of any one of claims 218-276,
wherein the coding sequence for the multidomain therapeutic protein is operably linked to a promoter in the nucleic acid construct and is expressed in the cell or population of cells.

358. A method of expressing a multidomain therapeutic protein comprising a TfR-binding delivery domain fused to a lysosomal alpha-glucosidase from a target genomic locus in a cell or a population of cells, comprising administering to the cell or the population of cells the composition of any one of claims 277-334,
wherein the nuclease agent cleaves the nuclease target site in the target genomic locus, the nucleic acid construct is inserted into the target genomic locus to create a modified target genomic locus, and the multidomain therapeutic protein comprising the TfR-binding delivery domain fused to the lysosomal alpha-glucosidase is expressed from the modified target genomic locus.

359. The method of any one of claims 356-358, wherein the cell is a liver cell or the population of cells is a population of liver cells, optionally wherein the cell is a hepatocyte or the population of cells is a population of hepatocytes.

360. The method of any one of claims 356-359, wherein the cell is a human cell or the population of cells is a population of human cells.

361. The method of any one of claims 356-360, wherein the cell is a neonatal cell or the population of cells is a population of neonatal cells.

362. The method of claim 361, wherein the neonatal cell or the population of neonatal cells is from a human neonatal subject within 24 weeks after birth.

363. The method of claim 361, wherein the neonatal cell or the population of neonatal cells is from a human neonatal subject within 12 weeks after birth.

364. The method of claim 361, wherein the neonatal cell or the population of neonatal cells is from a human neonatal subject within 8 weeks after birth.

365. The method of claim 361, wherein the neonatal cell or the population of neonatal cells is from a human neonatal subject within 4 weeks after birth.

366. The method of any one of claims 356-360, wherein the cell is not a neonatal cell or the population of cells is not a population of neonatal cells.

367. The method of any one of claims 356-366, wherein the cell is in vitro or ex vivo or the population of cells is in vitro or ex vivo.

368. The method of any one of claims 356-366, wherein the cell is in vivo in a subject or the population of cells is in vivo in a subject.

369. A method of inserting a nucleic acid encoding a multidomain therapeutic protein comprising a TfR-binding delivery domain fused to a lysosomal alpha-glucosidase into a target genomic locus in a cell in a subject, comprising administering to the subject the composition of any one of claims 277-334,
wherein the nuclease agent cleaves the nuclease target site in the target genomic locus, and the nucleic acid construct is inserted into the target genomic locus.

370. A method of expressing a multidomain therapeutic protein comprising a TfR-binding delivery domain fused to a lysosomal alpha-glucosidase protein in a cell in a subject, comprising administering to the subject the composition of any one of claims 218-276,
wherein the coding sequence for the multidomain therapeutic protein is operably linked to a promoter in the nucleic acid construct and is expressed in the cell.

371. A method of expressing a multidomain therapeutic protein comprising a TfR-binding delivery domain fused to a lysosomal alpha-glucosidase protein from a target genomic locus in a cell in a subject, comprising administering to the subject the composition of any one of claims 277-334,
wherein the nuclease agent cleaves the nuclease target site in the target genomic locus, the nucleic acid construct is inserted into the target genomic locus to create a modified target genomic locus, and the multidomain therapeutic protein comprising the TfR-binding delivery domain fused to the lysosomal alpha-glucosidase is expressed from the modified target genomic locus.

372. The method of claim 370, wherein the expressed multidomain therapeutic protein is delivered to and internalized by skeletal muscle, heart, and central nervous system tissue in the subject.

373. The method of any one of claims 369-372, wherein the cell is a liver cell, optionally wherein the cell is a hepatocyte.

374. The method of any one of claims 369-373, wherein the cell is a human cell.

375. The method of any one of claims 369-374, wherein the cell is a neonatal cell.

376. The method of claim 375, wherein the neonatal subject is a human subject within 24 weeks after birth.

377. The method of claim 375, wherein the neonatal subject is a human subject within 12 weeks after birth.

378. The method of claim 375, wherein the neonatal subject is a human subject within 8 weeks after birth.

379. The method of claim 375, wherein the neonatal subject is a human subject within 4 weeks after birth.

380. The method of any one of claims 369-374, wherein the cell is not a neonatal cell.

381. A method of treating a lysosomal alpha-glucosidase deficiency in a subject in need thereof, comprising administering to the subject the composition of any one of claims 218-276,
wherein the coding sequence for the multidomain therapeutic protein is operably linked to a promoter in the nucleic acid construct and is expressed in the subject.

382. A method of treating a lysosomal alpha-glucosidase deficiency in a subject in need thereof, comprising administering to the subject the composition of any one of claims 277-334,
wherein the nuclease agent cleaves the nuclease target site in the target genomic locus, the nucleic acid construct is inserted into the target genomic locus to create a modified target genomic locus, and the multidomain therapeutic protein comprising the TfR-binding delivery domain fused to the lysosomal alpha-glucosidase is expressed from the modified target genomic locus.

383. A method of reducing glycogen accumulation in a tissue in a subject in need thereof, comprising administering to the subject the composition of any one of claims 218-276,
wherein the coding sequence for the multidomain therapeutic protein is operably linked to a promoter in the nucleic acid construct and is expressed in the subject and reduces glycogen accumulation in the tissue.

384. A method of reducing glycogen accumulation in a tissue in a subject in need thereof, comprising administering to the subject the composition of any one of claims 277-334,
wherein the nuclease agent cleaves the nuclease target site in the target genomic locus, the nucleic acid construct is inserted into the target genomic locus to create a modified target genomic locus, and the multidomain therapeutic protein comprising the TfR-binding delivery domain fused to the lysosomal alpha-glucosidase is expressed from the modified target genomic locus and reduces glycogen accumulation in the tissue.

385. The method of any one of claims 368-384, wherein the subject has Pompe disease.

386. A method of treating Pompe disease in a subject in need thereof, comprising administering to the subject the composition of any one of claims 218-276,
wherein the coding sequence for the multidomain therapeutic protein is operably linked to a promoter in the nucleic acid construct and is expressed in the subject, thereby treating the Pompe disease.

387. A method of treating Pompe disease in a subject in need thereof, comprising administering to the subject the composition of any one of claims 277-334,
wherein the nuclease agent cleaves the nuclease target site in the target genomic locus, the nucleic acid construct is inserted into the target genomic locus to create a modified target genomic locus, and the multidomain therapeutic protein comprising the TfR-binding delivery domain fused to the lysosomal alpha-glucosidase is expressed from the modified target genomic locus, thereby treating the Pompe disease.

388. The method of any one of claims 385-387, wherein the Pompe disease is infantile-onset Pompe disease.

389. The method of any one of claims 385-387, wherein the Pompe disease is late-onset Pompe disease.

390. The method of any one of claims 368-389, wherein the subject is a human subject.

391. The method of any one of claims 368-390, wherein the subject is a neonatal subject.

392. The method of claim 391, wherein the neonatal subject is a human subject within 24 weeks after birth, optionally wherein the neonatal subject is a human subject within 12 weeks after birth, within 8 weeks after birth, or within 4 weeks after birth.

393. The method of any one of claims 368-390, wherein the subject is not a neonatal subject.

394. The method of any one of claims 368-393, wherein the method results in a therapeutically effective level of circulating multidomain therapeutic protein or lysosomal alpha-glucosidase in the subject.

395. The method of any one of claims 368-394, wherein the method reduces glycogen accumulation in skeletal muscle, heart, or central nervous system tissue in the subject.

396. The method of claim 395, wherein the method reduces glycogen accumulation in skeletal muscle, heart, and central nervous system tissue in the subject.

397. The method of claim 396, wherein the method results in reduced glycogen levels in skeletal muscle, heart, and central nervous system tissue in the subject comparable to wild type levels at the same age.

398. The method of any one of claims 368-397, wherein the method improves muscle strength in the subject or prevents loss of muscle strength in the subject compared to a control subject.

399. The method of claim 398, wherein the method results in the subject having muscle strength comparable to wild type levels at the same age.

400. A method of preventing or reducing the onset of a sign or symptom of Pompe disease in a neonatal subject in need thereof, comprising administering to the neonatal subject the composition of any one of claims 218-276,
wherein the coding sequence for the multidomain therapeutic protein is operably linked to a promoter in the nucleic acid construct and is expressed in the subject, thereby preventing or reducing the onset of a sign or symptom of the Pompe disease in the subject.

401. A method of preventing or reducing the onset of a sign or symptom of Pompe disease in a neonatal subject in need thereof, comprising administering to the neonatal subject the composition of any one of claims 277-334,
wherein the nuclease agent cleaves the nuclease target site, the nucleic acid construct is inserted into the target genomic locus to create a modified target genomic locus, and the multidomain therapeutic protein comprising the TfR-binding delivery domain fused to the lysosomal alpha-glucosidase is expressed from the modified target genomic locus, thereby preventing or reducing the onset of a sign or symptom of the Pompe disease in the subject.

402. The method of claim 400 or 401, wherein the Pompe disease is infantile-onset Pompe disease.

403. The method of claim 400 or 401, wherein the Pompe disease is late-onset Pompe disease.

404. The method of any one of claims 400-403, wherein the method results in a therapeutically effective level of circulating multidomain therapeutic protein or lysosomal alpha-glucosidase in the subject.

405. The method of any one of claims 400-404, wherein the method prevents or reduces glycogen accumulation in skeletal muscle, heart, or central nervous system tissue in the subject.

406. The method of any one of claims 400-405, wherein the method prevents or reduces glycogen accumulation in skeletal muscle, heart, and central nervous system tissue in the subject.

407. The method of any one of claims 400-406, wherein the subject is a human subject.

408. The method of any one of claims 400-407, wherein the subject is a neonatal subject.

409. The method of claim 408, wherein the neonatal subject is a human subject within 24 weeks after birth, optionally wherein the neonatal subject is a human subject within 12 weeks after birth.

410. The method of claim 408, wherein the neonatal subject is a human subject within 8 weeks after birth.

411. The method of claim 408, wherein the neonatal subject is a human subject within 4 weeks after birth.

412. The method of any one of claims 368-407, wherein the subject is not a neonatal subject.

413. The method of any one of claims 368-412, wherein the method results in increased expression of the multidomain therapeutic protein in the subject compared to a method comprising administering an episomal expression vector encoding the multidomain therapeutic protein to a control subject.

414. The method of any one of claims 368-413, wherein the method results in increased serum levels of the multidomain therapeutic protein in the subject compared to a method comprising administering an episomal expression vector encoding the multidomain therapeutic protein to a control subject.

415. The method of any one of claims 368-414, wherein the method results in serum levels of the multidomain therapeutic protein in the subject of at least about 1 µg/mL, at least about 2 µg/mL, at least about 3 µg/mL, at least about 4 µg/mL, at least about 5 µg/mL, at least about 6 µg/mL, at least about 7 µg/mL, at least about 8 µg/mL, at least about 9 µg/mL, or at least about 10 µg/mL.

416. The method of any one of claims 368-415, wherein the method results in serum levels of the multidomain therapeutic protein in the subject of at least about 2 µg/mL or at least about 5 µg/mL.

417. The method of any one of claims 368-416, wherein the method results in serum levels of the multidomain therapeutic protein in the subject of between about 2 µg/mL and about 30 µg/mL or between about 2 µg/mL and about 20 µg/mL.

418. The method of any one of claims 368-417, wherein the method results in serum levels of the multidomain therapeutic protein in the subject of between about 5 µg/mL and about 30 µg/mL or between about 5 µg/mL and about 20 µg/mL.

419. The method of any one of claims 368-418, wherein the method achieves lysosomal alpha-glucosidase activity levels of at least about 40% of normal, at least about 45% of normal, at least about 50%, at least about 60%, at least about 70%, at least about 80%, at least about 90%, or 100% of normal.

420. The method of any one of claims 368-419, wherein:
(I) the subject has infantile-onset Pompe disease, and the method achieves lysosomal alpha-glucosidase expression or activity levels of at least about 1% or more than about 1% of normal; or
(II) the subject has late-onset Pompe disease, and the method achieves lysosomal alpha-glucosidase expression or activity levels of at least about 40% of normal or more than about 40% of normal.

421. The method of any one of claims 368-420, wherein the expression or activity of the multidomain therapeutic protein is at least 50% of the expression or activity of the multidomain therapeutic protein at a peak level of expression measured for the subject at 24 weeks after the administering.

422. The method of any one of claims 368-421, wherein the expression or activity of the multidomain therapeutic protein is at least 50% of the expression or activity of the multidomain therapeutic protein at a peak level of expression measured for the subject at one year after the administering.

423. The method of any one of claims 368-422, wherein the expression or activity of the multidomain therapeutic protein is at least 60% of the expression or activity of the multidomain therapeutic protein at a peak level of expression measured for the subject at 24 weeks after the administering.

424. The method of any one of claims 368-423, wherein the expression or activity of the multidomain therapeutic protein is at least 50% of the expression or activity of the multidomain therapeutic protein at a peak level of expression measured for the subject at two years after the administering.

425. The method of any one of claims 368-424, wherein the expression or activity of the multidomain therapeutic protein is at least 60% of the expression or activity of the multidomain therapeutic protein at a peak level of expression measured for the subject at 2 years after the administering.

426. The method of any one of claims 368-425, wherein the expression or activity of the multidomain therapeutic protein is at least 60% of the expression or activity of the multidomain therapeutic protein at a peak level of expression measured for the subject at 24 weeks after the administering.

427. The method of any one of claim 368-426, wherein the method further comprises assessing preexisting AAV immunity in the subject prior to administering the nucleic acid construct to the subject.

428. The method of claim 427, wherein the preexisting AAV immunity is preexisting AAV8 immunity.

429. The method of claim 427 or 428, wherein assessing preexisting AAV immunity comprises assessing immunogenicity using a total antibody immune assay or a neutralizing antibody assay.

430. The method of any one of claims 356-429, wherein the nucleic acid construct is administered simultaneously with the nuclease agent or the one or more nucleic acids encoding the nuclease agent.

431. The method of any one of claims 356-429, wherein the nucleic acid construct is not administered simultaneously with the nuclease agent or the one or more nucleic acids encoding the nuclease agent.

432. The method of claim 431, wherein the nucleic acid construct is administered prior to the nuclease agent or the one or more nucleic acids encoding the nuclease agent.

433. The method of claim 431, wherein the nucleic acid construct is administered after the nuclease agent or the one or more nucleic acids encoding the nuclease agent.

434. A composition comprising a nucleic acid construct comprising a coding sequence for lysosomal alpha-glucosidase, wherein the lysosomal alpha-glucosidase coding sequence is CpG-depleted relative to a wild type lysosomal alpha-glucosidase coding sequence.

435. The composition of claim 434, wherein the lysosomal alpha-glucosidase lacks the lysosomal alpha-glucosidase signal peptide and propeptide.

436. The composition of claim 434 or 435, wherein the lysosomal alpha-glucosidase comprises the sequence set forth in SEQ ID NO: 173.

437. The composition of any one of claims 434-436, wherein the lysosomal alpha-glucosidase consists of the sequence set forth in SEQ ID NO: 173.

438. The composition of any one of claims 434-437, wherein the lysosomal alpha-glucosidase coding sequence is codon-optimized and CpG-depleted.

439. The composition of any one of claims 434-438, wherein the lysosomal alpha-glucosidase coding sequence is at least 90%, at least 91%, at least 92%, at least 93%, at least 94%, at least 95%, at least 96%, at least 97%, at least 98%, or at least 99% identical to any one of SEQ ID NOS: 174-182 and 205-212,
optionally wherein the lysosomal alpha-glucosidase coding sequence is at least 90%, at least 91%, at least 92%, at least 93%, at least 94%, at least 95%, at least 96%, at least 97%, at least 98%, or at least 99% identical to SEQ ID NO: 176.

440. The composition of any one of claims 434-439, wherein the lysosomal alpha-glucosidase coding sequence is at least 90%, at least 91%, at least 92%, at least 93%, at least 94%, at least 95%, at least 96%, at least 97%, at least 98%, or at least 99% identical to any one of SEQ ID NOS: 174-182 and 205-212 and encodes a lysosomal alpha-glucosidase protein comprising SEQ ID NO: 173,
optionally wherein the lysosomal alpha-glucosidase coding sequence is at least 90%, at least 91%, at least 92%, at least 93%, at least 94%, at least 95%, at least 96%, at least 97%, at least 98%, or at least 99% identical to SEQ ID NO: 176 and encodes a lysosomal alpha-glucosidase protein comprising SEQ ID NO: 173.

441. The composition of any one of claims 434-440, wherein the lysosomal alpha-glucosidase coding sequence is at least 90%, at least 91%, at least 92%, at least 93%, at least 94%, at least 95%, at least 96%, at least 97%, at least 98%, or at least 99% identical to any one of SEQ ID NOS: 174-182 and 205-212, is codon-optimized and CpG-depleted, and encodes a lysosomal alpha-glucosidase protein comprising SEQ ID NO: 173,
optionally wherein the lysosomal alpha-glucosidase coding sequence is at least 90%, at least 91%, at least 92%, at least 93%, at least 94%, at least 95%, at least 96%, at least 97%, at least 98%, or at least 99% identical to SEQ ID NO: 176, is codon-optimized and CpG-depleted, and encodes a lysosomal alpha-glucosidase protein comprising SEQ ID NO: 173.

442. The composition of any one of claims 434-441, wherein the lysosomal alpha-glucosidase coding sequence comprises the sequence set forth in any one of SEQ ID NOS: 174-182 and 205-212,
optionally wherein the lysosomal alpha-glucosidase coding sequence comprises the sequence set forth in SEQ ID NO: 176.

443. The composition of any one of claims 434-442, wherein the lysosomal alpha-glucosidase coding sequence consists of the sequence set forth in any one of SEQ ID NOS: 174-182 and 205-212,
optionally wherein the lysosomal alpha-glucosidase coding sequence consists of the sequence set forth in SEQ ID NO: 176.

444. The composition of any one of claims 434-443, wherein the nucleic acid construct comprises a splice acceptor upstream of the lysosomal alpha-glucosidase coding sequence.

445. The composition of any one of claims 434-444, wherein the nucleic acid construct comprises a polyadenylation signal or sequence downstream of the lysosomal alpha-glucosidase coding sequence.

446. The composition of any one of claims 434-445, wherein the nucleic acid construct comprises a splice acceptor upstream of the lysosomal alpha-glucosidase coding sequence, and the nucleic acid construct comprises a polyadenylation signal or sequence downstream of the lysosomal alpha-glucosidase coding sequence.

447. The composition of any one of claims 434-446, wherein the nucleic acid construct does not comprise a homology arm.

448. The composition of any one of claims 434-446, wherein the nucleic acid construct comprises homology arms.

449. The composition of any one of claims 434-448, wherein the nucleic acid construct does not comprise a promoter that drives the expression of the lysosomal alpha-glucosidase.

450. The composition of any one of claims 434-448, wherein the lysosomal alpha-glucosidase coding sequence is operably linked to a promoter, optionally wherein the promoter is a liver-specific promoter.

451. The composition of any one of claims 434-450, wherein the nucleic acid construct is single-stranded DNA or double-stranded DNA, optionally wherein the nucleic acid construct is single-stranded DNA.

452. The composition of any one of claims 434-451, wherein the nucleic acid construct comprises from 5′ to 3′: a splice acceptor, the lysosomal alpha-glucosidase coding sequence, and a polyadenylation signal or sequence,
wherein the lysosomal alpha-glucosidase coding sequence comprises any one of SEQ ID NOS: 174-182 and 205-212, optionally wherein the lysosomal alpha-glucosidase coding sequence comprises SEQ ID NO: 176,
wherein the nucleic acid construct does not comprise a promoter that drives the expression of the lysosomal alpha-glucosidase, and
wherein the nucleic acid construct does not comprise a homology arm.

453. The composition of any one of claims 434-452, wherein the nucleic acid construct is in a nucleic acid vector or a lipid nanoparticle.

454. The composition of claim 453, wherein the nucleic acid construct is in the nucleic acid vector.

455. The composition of claim 454, wherein the nucleic acid vector is a viral vector.

456. The composition of claim 453 or 454, wherein the nucleic acid vector is an adeno-associated viral (AAV) vector,
optionally wherein the nucleic acid construct is flanked by inverted terminal repeats (ITRs) on each end, optionally wherein the ITR on at least one end comprises, consists essentially of, or consists of SEQ ID NO: 160, and optionally wherein the ITR on each end comprises, consists essentially of, or consists of SEQ ID NO: 160.

457. The composition of claim 456, wherein the AAV vector is a single-stranded AAV (ssAAV) vector.

458. The composition of claim 456 or 457, wherein the AAV vector is derived from an AAV8 vector, an AAV3B vector, an AAV5 vector, an AAV6 vector, an AAV7 vector, an AAV9 vector, an AAVrh.74 vector, or an AAVhu.37 vector.

459. The composition of claim 458, wherein the AAV vector is a recombinant AAV8 (rAAV8) vector.

460. The composition of claim 459, wherein the AAV vector is a single-stranded rAAV8 vector.

461. The composition of any one of claims 434-460, wherein the nucleic acid construct comprises from 5′ to 3′: a splice acceptor, the lysosomal alpha-glucosidase coding sequence, and a polyadenylation signal or sequence,
wherein the lysosomal alpha-glucosidase coding sequence comprises any one of SEQ ID NOS: 174-182 and 205-212, optionally wherein the lysosomal alpha-glucosidase coding sequence comprises SEQ ID NO: 176,
wherein the nucleic acid construct does not comprise a promoter that drives the expression of the lysosomal alpha-glucosidase,
wherein the nucleic acid construct does not comprise a homology arm, and
wherein the nucleic acid construct is in a single-stranded rAAV8 vector, optionally wherein the nucleic acid construct is flanked by inverted terminal repeats (ITRs) on each end, optionally wherein the ITR on at least one end comprises, consists essentially of, or consists of SEQ ID NO: 160, and optionally wherein the ITR on each end comprises, consists essentially of, or consists of SEQ ID NO: 160.

462. The composition of any one of claims 434-461, wherein the nucleic acid construct is CpG-depleted.

463. The composition of any one of claims 434-462, further comprising a nuclease agent that targets a nuclease target site in a target genomic locus.

464. The composition of claim 463, wherein the target genomic locus is an albumin gene, optionally wherein the albumin gene is a human albumin gene.

465. The composition of claim 464, wherein the nuclease target site is in intron 1 of the albumin gene.

466. The composition of any one of claims 463-465, wherein the nuclease agent comprises:
(a) a zinc finger nuclease (ZFN);
(b) a transcription activator-like effector nuclease (TALEN); or
(c) (i) a Cas protein or a nucleic acid encoding the Cas protein; and
(ii) a guide RNA or one or more DNAs encoding the guide RNA, wherein the guide RNA comprises a DNA-targeting segment that targets a guide RNA target sequence, and wherein the guide RNA binds to the Cas protein and targets the Cas protein to the guide RNA target sequence.

467. The composition of any one of claims 463-465, wherein the nuclease agent comprises:
(a) a Cas protein or a nucleic acid encoding the Cas protein; and
(b) a guide RNA or one or more DNAs encoding the guide RNA, wherein the guide RNA comprises a DNA-targeting segment that targets a guide RNA target sequence, and wherein the guide RNA binds to the Cas protein and targets the Cas protein to the guide RNA target sequence.

468. The composition of claim 467, wherein the guide RNA target sequence is in intron 1 of an albumin gene.

469. The composition of claim 468, wherein the albumin gene is a human albumin gene.

470. The composition of any one of claims 467-469, wherein:
(I) the DNA-targeting segment comprises at least 17, at least 18, at least 19, or at least 20 contiguous nucleotides of the sequence set forth in any one of SEQ ID NOS: 30-61, optionally wherein the DNA-targeting segment comprises at least 17, at least 18, at least 19, or at least 20 contiguous nucleotides of the sequence set forth in any one of SEQ ID NOS: 36, 30, 33, and 41; and/or
(II) the DNA-targeting segment is at least 90% or at least 95% identical to the sequence set forth in any one of SEQ ID NOS: 30-61, optionally wherein the DNA-targeting segment is at least 90% or at least 95% identical to the sequence set forth in any one of SEQ ID NOS: 36, 30, 33, and 41.

471. The composition of any one of claims 467-470, wherein the DNA-targeting segment comprises any one of SEQ ID NOS: 30-61, optionally wherein the DNA-targeting segment comprises any one of SEQ ID NOS: 36, 30, 33, and 41.

472. The composition of any one of claims 467-471, wherein the DNA-targeting segment consists of any one of SEQ ID NOS: 30-61, optionally wherein the DNA-targeting segment consists of any one of SEQ ID NOS: 36, 30, 33, and 41.

473. The composition of any one of claims 467-472, wherein the guide RNA comprises any one of SEQ ID NOS: 62-125, optionally wherein the guide RNA comprises any one of SEQ ID NOS: 68, 100, 62, 94, 65, 97, 73, and 105.

474. The composition of any one of claims 467-473, wherein:
(I) the DNA-targeting segment comprises at least 17, at least 18, at least 19, or at least 20 contiguous nucleotides of SEQ ID NO: 36; and/or
(II) the DNA-targeting segment is at least 90% or at least 95% identical to SEQ ID NO: 36.

475. The composition of any one of claims 467-474, wherein the DNA-targeting segment comprises SEQ ID NO: 36.

476. The composition of any one of claims 467-475, wherein the DNA-targeting segment consists of SEQ ID NO: 36.

477. The composition of any one of claims 467-476, wherein the guide RNA comprises SEQ ID NO: 68 or 100.

478. The composition of any one of claims 467-477, wherein the guide RNA in the form of RNA.

479. The composition of any one of claims 467-478, wherein the guide RNA comprises at least one modification.

480. The composition of claim 479, wherein the at least one modification comprises a 2′-O-methyl-modified nucleotide.

481. The composition of claim 479 or 480, wherein the at least one modification comprises a phosphorothioate bond between nucleotides.

482. The composition of any one of claims 479-481, wherein the at least one modification comprises a modification at one or more of the first five nucleotides at the 5′ end of the guide RNA.

483. The composition of any one of claims 479-482, wherein the at least one modification comprises a modification at one or more of the last five nucleotides at the 3′ end of the guide RNA.

484. The composition of any one of claims 479-483, wherein the at least one modification comprises phosphorothioate bonds between the first four nucleotides at the 5′ end of the guide RNA.

485. The composition of any one of claims 479-484, wherein the at least one modification comprises phosphorothioate bonds between the last four nucleotides at the 3′ end of the guide RNA.

486. The composition of any one of claims 479-485, wherein the at least one modification comprises 2′-O-methyl-modified nucleotides at the first three nucleotides at the 5′ end of the guide RNA.

487. The composition of any one of claims 479-486, wherein the at least one modification comprises 2′-O-methyl-modified nucleotides at the last three nucleotides at the 3′ end of the guide RNA.

488. The composition of any one of claims 479-487, wherein the at least one modification comprises: (i) phosphorothioate bonds between the first four nucleotides at the 5′ end of the guide RNA; (ii) phosphorothioate bonds between the last four nucleotides at the 3′ end of the guide RNA; (iii) 2′-O-methyl-modified nucleotides at the first three nucleotides at the 5′ end of the guide RNA; and (iv) 2′-O-methyl-modified nucleotides at the last three nucleotides at the 3′ end of the guide RNA.

489. The composition of any one of claims 467-488, wherein the guide RNA is a single guide RNA (sgRNA).

490. The composition of any one of claims 467-489, wherein the guide RNA in the form of RNA, the guide RNA comprises SEQ ID NO: 100, and the guide RNA comprises: (i) phosphorothioate bonds between the first four nucleotides at the 5′ end of the guide RNA; (ii) phosphorothioate bonds between the last four nucleotides at the 3′ end of the guide RNA; (iii) 2′-O-methyl-modified nucleotides at the first three nucleotides at the 5′ end of the guide RNA; and (iv) 2′-O-methyl-modified nucleotides at the last three nucleotides at the 3′ end of the guide RNA.

491. The composition of any one of claims 467-490, wherein the Cas protein is a Cas9 protein.

492. The composition of claim 491, wherein the Cas9 protein is derived from a Streptococcus pyogenes Cas9 protein, a Staphylococcus aureus Cas9 protein, a Campylobacter jejuni Cas9 protein, a Streptococcus thermophilus Cas9 protein, or a Neisseria meningitidis Cas9 protein.

493. The composition of claim 491, wherein the Cas protein is derived from a Streptococcus pyogenes Cas9 protein.

494. The composition of any one of claims 467-493, wherein the Cas protein comprises the sequence set forth in SEQ ID NO: 11.

495. The composition of any one of claims 467-494, wherein the nucleic acid encoding the Cas protein is codon-optimized for expression in a mammalian cell or a human cell.

496. The composition of any one of claims 467-495, wherein the composition comprises the nucleic acid encoding the Cas protein, wherein the nucleic acid comprises an mRNA encoding the Cas protein.

497. The composition of claim 496, wherein the mRNA encoding the Cas protein comprises at least one modification.

498. The composition of claim 496 or 497, wherein the mRNA encoding the Cas protein is modified to comprise a modified uridine at one or more or all uridine positions.

499. The composition of claim 498, wherein the modified uridine is pseudouridine or N1-methyl-pseudouridine, optionally N1-methyl-pseudouridine.

500. The composition of claim 498 or 499, wherein the mRNA encoding the Cas protein is fully substituted with pseudouridine or N1-methyl-pseudouridine, optionally N1-methyl-pseudouridine.

501. The composition of any one of claims 496-500, wherein the mRNA encoding the Cas protein comprises a 5′ cap.

502. The composition of any one of claims 496-501, wherein the mRNA encoding the Cas protein comprises a polyadenylation sequence.

503. The composition of any one of claims 496-502, wherein the mRNA encoding the Cas protein comprises the sequence set forth in SEQ ID NO: 226, 225, or 12.

504. The composition of any one of claims 467-503, wherein the composition comprises the nucleic acid encoding the Cas protein, wherein the nucleic acid comprises an mRNA encoding the Cas protein, the mRNA encoding the Cas protein comprises the sequence set forth in SEQ ID NO: 226, 225, or 12, and the mRNA encoding the Cas protein is fully substituted with pseudouridine or N1-methyl-pseudouridine, optionally N1-methyl-pseudouridine, comprises a 5′ cap, and comprises a polyadenylation sequence.

505. The composition of any one of claims 467-504, wherein the guide RNA in the form of RNA, and the guide RNA comprises SEQ ID NO: 68 or 100, and
wherein the composition comprises the nucleic acid encoding the Cas protein, wherein the nucleic acid comprises an mRNA encoding the Cas protein, and the mRNA encoding the Cas protein comprises the sequence set forth in SEQ ID NO: 226, 225, or 12.

506. The composition of claim 505, wherein the nucleic acid construct comprises from 5′ to 3′: a splice acceptor, the lysosomal alpha-glucosidase coding sequence, and a polyadenylation signal or sequence,
wherein the lysosomal alpha-glucosidase coding sequence comprises any one of SEQ ID NOS: 174-182 and 205-212, optionally wherein the lysosomal alpha-glucosidase coding sequence comprises SEQ ID NO: 176,
wherein the nucleic acid construct does not comprise a promoter that drives the expression of the lysosomal alpha-glucosidase,
wherein the nucleic acid construct does not comprise a homology arm, and
wherein the nucleic acid construct is in a single-stranded rAAV8 vector, optionally wherein the nucleic acid construct is flanked by inverted terminal repeats (ITRs) on each end, optionally wherein the ITR on at least one end comprises, consists essentially of, or consists of SEQ ID NO: 160, and optionally wherein the ITR on each end comprises, consists essentially of, or consists of SEQ ID NO: 160.

507. The composition of any one of claims 467-504, wherein the guide RNA in the form of RNA, the guide RNA comprises SEQ ID NO: 100, and the guide RNA comprises: (i) phosphorothioate bonds between the first four nucleotides at the 5′ end of the guide RNA; (ii) phosphorothioate bonds between the last four nucleotides at the 3′ end of the guide RNA; (iii) 2′-O-methyl-modified nucleotides at the first three nucleotides at the 5′ end of the guide RNA; and (iv) 2′-O-methyl-modified nucleotides at the last three nucleotides at the 3′ end of the guide RNA, and
wherein the composition comprises the nucleic acid encoding the Cas protein, wherein the nucleic acid comprises an mRNA encoding the Cas protein, the mRNA encoding the Cas protein comprises the sequence set forth in SEQ ID NO: 226, 225, or 12, and the mRNA encoding the Cas protein is fully substituted with pseudouridine or N1-methyl-pseudouridine, optionally N1-methyl-pseudouridine, comprises a 5′ cap, and comprises a polyadenylation sequence.

508. The composition of claim 507, wherein the nucleic acid construct comprises from 5′ to 3′: a splice acceptor, the lysosomal alpha-glucosidase coding sequence, and a polyadenylation signal or sequence,
wherein the lysosomal alpha-glucosidase coding sequence comprises any one of SEQ ID NOS: 174-182 and 205-212, optionally wherein the lysosomal alpha-glucosidase coding sequence comprises SEQ ID NO: 176,
wherein the nucleic acid construct does not comprise a promoter that drives the expression of the lysosomal alpha-glucosidase,
wherein the nucleic acid construct does not comprise a homology arm, and
wherein the nucleic acid construct is in a single-stranded rAAV8 vector, optionally wherein the nucleic acid construct is flanked by inverted terminal repeats (ITRs) on each end, optionally wherein the ITR on at least one end comprises, consists essentially of, or consists of SEQ ID NO: 160, and optionally wherein the ITR on each end comprises, consists essentially of, or consists of SEQ ID NO: 160.

509. The composition of any one of claims 467-508, wherein the Cas protein or the nucleic acid encoding the Cas protein and the guide RNA or the one or more DNAs encoding the guide RNA are associated with a lipid nanoparticle.

510. The composition of claim 509, wherein the lipid nanoparticle comprises a cationic lipid, a neutral lipid, a helper lipid, and a stealth lipid.

511. The composition of claim 510, wherein the cationic lipid is Lipid A ((9Z,12Z)-3-((4,4-bis(octyloxy)butanoyl)oxy)-2-((((3-(diethylamino)propoxy)carbonyl)oxy)methyl)propyl octadeca-9,12-dienoate).

512. The composition of claim 510 or 511, wherein the neutral lipid is distearoylphosphatidylcholine or 1,2-distearoyl-sn-glycero-3-phosphocholine (DSPC).

513. The composition of any one of claims 510-512, wherein the helper lipid is cholesterol.

514. The composition of any one of claims 510-513, wherein the stealth lipid is 1,2-dimyristoyl-rac-glycero-3-methoxypolyethylene glycol-2000 (PEG2k-DMG).

515. The composition of any one of claims 510-514, wherein the cationic lipid is Lipid A, the neutral lipid is DSPC, the helper lipid is cholesterol, and the stealth lipid is PEG2k-DMG.

516. The composition of any one of claims 509-515, wherein the lipid nanoparticle comprises four lipids at the following molar ratios: about 50 mol% Lipid A, about 9 mol% DSPC, about 38 mol% cholesterol, and about 3 mol% PEG2k-DMG.

517. The composition of any one of claims 467-516, wherein the albumin gene is a human albumin gene,
wherein the guide RNA in the form of RNA, and the guide RNA comprises SEQ ID NO: 68 or 100,
wherein the composition comprises the nucleic acid encoding the Cas protein, wherein the nucleic acid comprises an mRNA encoding the Cas protein, and the mRNA encoding the Cas protein comprises the sequence set forth in SEQ ID NO: 226, 225, or 12, and
wherein the guide RNA and the mRNA encoding the Cas protein are associated with a lipid nanoparticle comprising Lipid A, DSPC, cholesterol, and PEG2k-DMG, optionally at the following molar ratios: about 50 mol% Lipid A, about 9 mol% DSPC, about 38 mol% cholesterol, and about 3 mol% PEG2k-DMG.

518. The composition of claim 517, wherein the nucleic acid construct comprises from 5′ to 3′: a splice acceptor, the lysosomal alpha-glucosidase coding sequence, and a polyadenylation signal or sequence,
wherein the lysosomal alpha-glucosidase coding sequence comprises any one of SEQ ID NOS: 174-182 and 205-212, optionally wherein the lysosomal alpha-glucosidase coding sequence comprises SEQ ID NO: 176,
wherein the nucleic acid construct does not comprise a promoter that drives the expression of the lysosomal alpha-glucosidase,
wherein the nucleic acid construct does not comprise a homology arm, and
wherein the nucleic acid construct is in a single-stranded rAAV8 vector, optionally wherein the nucleic acid construct is flanked by inverted terminal repeats (ITRs) on each end, optionally wherein the ITR on at least one end comprises, consists essentially of, or consists of SEQ ID NO: 160, and optionally wherein the ITR on each end comprises, consists essentially of, or consists of SEQ ID NO: 160.

519. The composition of any one of claims 467-516, wherein the albumin gene is a human albumin gene,
wherein the guide RNA in the form of RNA, the guide RNA comprises SEQ ID NO: 100, and the guide RNA comprises: (i) phosphorothioate bonds between the first four nucleotides at the 5′ end of the guide RNA; (ii) phosphorothioate bonds between the last four nucleotides at the 3′ end of the guide RNA; (iii) 2′-O-methyl-modified nucleotides at the first three nucleotides at the 5′ end of the guide RNA; and (iv) 2′-O-methyl-modified nucleotides at the last three nucleotides at the 3′ end of the guide RNA,
wherein the composition comprises the nucleic acid encoding the Cas protein, wherein the nucleic acid comprises an mRNA encoding the Cas protein, the mRNA encoding the Cas protein comprises the sequence set forth in SEQ ID NO: 226, 225, or 12, and the mRNA encoding the Cas protein is fully substituted with pseudouridine or N1-methyl-pseudouridine, optionally N1-methyl-pseudouridine, comprises a 5′ cap, and comprises a polyadenylation sequence, and
wherein the guide RNA and the mRNA encoding the Cas protein are associated with a lipid nanoparticle comprising Lipid A, DSPC, cholesterol, and PEG2k-DMG, optionally at the following molar ratios: about 50 mol% Lipid A, about 9 mol% DSPC, about 38 mol% cholesterol, and about 3 mol% PEG2k-DMG.

520. The composition of claim 519, wherein the nucleic acid construct comprises from 5′ to 3′: a splice acceptor, the lysosomal alpha-glucosidase coding sequence, and a polyadenylation signal or sequence,
wherein the lysosomal alpha-glucosidase coding sequence comprises any one of SEQ ID NOS: 174-182 and 205-212, optionally wherein the lysosomal alpha-glucosidase coding sequence comprises SEQ ID NO: 176,
wherein the nucleic acid construct does not comprise a promoter that drives the expression of the lysosomal alpha-glucosidase,
wherein the nucleic acid construct does not comprise a homology arm, and
wherein the nucleic acid construct is in a single-stranded rAAV8 vector, optionally wherein the nucleic acid construct is flanked by inverted terminal repeats (ITRs) on each end, optionally wherein the ITR on at least one end comprises, consists essentially of, or consists of SEQ ID NO: 160, and optionally wherein the ITR on each end comprises, consists essentially of, or consists of SEQ ID NO: 160.

521. The composition of any one of claims 434-520, for use in a method of inserting the lysosomal alpha-glucosidase coding sequence into a target genomic locus in a cell or a population of cells.

522. The composition of any one of claims 434-520, for use in a method of expressing the lysosomal alpha-glucosidase from a target genomic locus in a cell or a population of cells or for use in a method of expressing the lysosomal alpha-glucosidase in a cell or a population of cells.

523. The composition of any one of claims 434-520, for use in a method of inserting the lysosomal alpha-glucosidase coding sequence into a target genomic locus in a cell or a population of cells in a subject.

524. The composition of any one of claims 434-520, for use in a method of expressing the lysosomal alpha-glucosidase from a target genomic locus in a cell or a population of cells in a subject or for use in a method of expressing the lysosomal alpha-glucosidase in a cell or a population of cells in a subject.

525. The composition of any one of claims 434-520, for use in a method of treating a lysosomal alpha-glucosidase deficiency in a subject in need thereof.

526. The composition of any one of claims 434-520, for use in a method of reducing glycogen accumulation in a tissue in a subject in need thereof.

527. The composition of any one of claims 434-520, for use in a method of treating Pompe disease in a subject in need thereof.

528. The composition of any one of claims 434-520, for use in a method of preventing or reducing the onset of a sign or symptom of Pompe disease in a neonatal subject in need thereof.

529. A cell comprising the composition of any one of claims 434-520.

530. The cell of claim 529, wherein the nucleic acid construct is integrated into a target genomic locus, and wherein the lysosomal alpha-glucosidase is expressed from the target genomic locus, or wherein the nucleic acid construct is integrated into intron 1 of an endogenous albumin locus, and wherein the lysosomal alpha-glucosidase is expressed from the endogenous albumin locus.

531. The cell of claim 529 or 530, wherein the cell is a liver cell.

532. The cell of claim 531, wherein the liver cell is a hepatocyte.

533. The cell of any one of claims 529-532, wherein the cell is a human cell.

534. The cell of any one of claims 529-533, wherein the cell is a neonatal cell.

535. The cell of claim 534, wherein the neonatal cell is from a human neonatal subject within 24 weeks after birth.

536. The cell of claim 534, wherein the neonatal cell is from a human neonatal subject within 12 weeks after birth.

537. The cell of claim 534, wherein the neonatal cell is from a human neonatal subject within 8 weeks after birth.

538. The cell of claim 534, wherein the neonatal cell is from a human neonatal subject within 4 weeks after birth.

539. The cell of any one of claims 529-533, wherein the cell is not a neonatal cell.

540. The cell of any one of claims 529-539, wherein the cell is in vivo.

541. The cell of any one of claims 529-539, wherein the cell is in vitro or ex vivo.

542. A method of inserting a lysosomal alpha-glucosidase coding sequence into a target genomic locus in a cell or a population of cells, comprising administering to the cell or the population of cells the composition of any one of claims 463-520,
wherein the nuclease agent cleaves the nuclease target site in the target genomic locus, and the nucleic acid construct is inserted into the target genomic locus.

543. A method of expressing a lysosomal alpha-glucosidase in a cell or a population of cells, comprising administering to the cell or the population of cells the composition of any one of claims 434-462,
wherein the lysosomal alpha-glucosidase coding sequence is operably linked to a promoter in the nucleic acid construct and is expressed in the cell or population of cells.

544. A method of expressing a lysosomal alpha-glucosidase from a target genomic locus in a cell or a population of cells, comprising administering to the cell or the population of cells the composition of any one of claims 463-520,
wherein the nuclease agent cleaves the nuclease target site in the target genomic locus, the nucleic acid construct is inserted into the target genomic locus to create a modified target genomic locus, and the lysosomal alpha-glucosidase is expressed from the modified target genomic locus.

545. The method of any one of claims 542-544, wherein the cell is a liver cell or the population of cells is a population of liver cells, optionally wherein the cell is a hepatocyte or the population of cells is a population of hepatocytes.

546. The method of any one of claims 542-545, wherein the cell is a human cell or the population of cells is a population of human cells.

547. The method of any one of claims 542-546, wherein the cell is a neonatal cell or the population of cells is a population of neonatal cells.

548. The method of claim 547, wherein the neonatal cell or the population of neonatal cells is from a human neonatal subject within 24 weeks after birth.

549. The method of claim 547, wherein the neonatal cell or the population of neonatal cells is from a human neonatal subject within 12 weeks after birth.

550. The method of claim 547, wherein the neonatal cell or the population of neonatal cells is from a human neonatal subject within 8 weeks after birth.

551. The method of claim 547, wherein the neonatal cell or the population of neonatal cells is from a human neonatal subject within 4 weeks after birth.

552. The method of any one of claims 542-546, wherein the cell is not a neonatal cell or the population of cells is not a population of neonatal cells.

553. The method of any one of claims 542-552, wherein the cell is in vitro or ex vivo or the population of cells is in vitro or ex vivo.

554. The method of any one of claims 542-552, wherein the cell is in vivo in a subject or the population of cells is in vivo in a subject.

555. A method of inserting a lysosomal alpha-glucosidase coding sequence into a target genomic locus in a cell in a subject, comprising administering to the subject the composition of any one of claims 463-520,
wherein the nuclease agent cleaves the nuclease target site in the target genomic locus, and the nucleic acid construct is inserted into the target genomic locus.

556. A method of expressing a lysosomal alpha-glucosidase in a cell in a subject, comprising administering to the subject the composition of any one of claims 434-462,
wherein the lysosomal alpha-glucosidase coding sequence is operably linked to a promoter in the nucleic acid construct and is expressed in the cell.

557. A method of expressing a lysosomal alpha-glucosidase from a target genomic locus in a cell in a subject, comprising administering to the subject the composition of any one of claims 463-520,
wherein the nuclease agent cleaves the nuclease target site in the target genomic locus, the nucleic acid construct is inserted into the target genomic locus to create a modified target genomic locus, and the lysosomal alpha-glucosidase is expressed from the modified target genomic locus.

558. The method of any one of claims 555-557, wherein the cell is a liver cell, optionally wherein the cell is a hepatocyte.

559. The method of any one of claims 555-558, wherein the cell is a human cell.

560. The method of any one of claims 555-559, wherein the cell is a neonatal cell in a neonatal subject.

561. The method of claim 560, wherein the neonatal subject is a human subject within 24 weeks after birth.

562. The method of claim 560, wherein the neonatal subject is a human subject within 12 weeks after birth.

563. The method of claim 560, wherein the neonatal subject is a human subject within 8 weeks after birth.

564. The method of claim 560, wherein the neonatal subject is a human subject within 4 weeks after birth.

565. The method of any one of claims 555-559, wherein the cell is not a neonatal cell.

566. A method of treating a lysosomal alpha-glucosidase deficiency in a subject in need thereof, comprising administering to the subject the composition of any one of claims 434-462,
wherein the lysosomal alpha-glucosidase coding sequence is operably linked to a promoter in the nucleic acid construct and is expressed in the subject.

567. A method of treating a lysosomal alpha-glucosidase deficiency in a subject in need thereof, comprising administering to the subject the composition of any one of claims 463-520,
wherein the nuclease agent cleaves the nuclease target site in the target genomic locus, the nucleic acid construct is inserted into the target genomic locus to create a modified target genomic locus, and the lysosomal alpha-glucosidase is expressed from the modified target genomic locus.

568. A method of reducing glycogen accumulation in a tissue in a subject in need thereof, comprising administering to the subject the composition of any one of claims 434-462,
wherein the lysosomal alpha-glucosidase coding sequence is operably linked to a promoter in the nucleic acid construct and is expressed in the subject and reduces glycogen accumulation in the tissue.

569. A method of reducing glycogen accumulation in a tissue in a subject in need thereof, comprising administering to the subject the composition of any one of claims 463-520,
wherein the nuclease agent cleaves the nuclease target site in the target genomic locus, the nucleic acid construct is inserted into the target genomic locus to create a modified target genomic locus, and the lysosomal alpha-glucosidase is expressed from the modified target genomic locus and reduces glycogen accumulation in the tissue.

570. The method of any one of claims 554-569, wherein the subject has Pompe disease.

571. A method of treating Pompe disease in a subject in need thereof, comprising administering to the subject the composition of any one of claims 434-462,
wherein the lysosomal alpha-glucosidase coding sequence is operably linked to a promoter in the nucleic acid construct and is expressed in the subject, thereby treating the Pompe disease.

572. A method of treating Pompe disease in a subject in need thereof, comprising administering to the subject the composition of any one of claims 463-520,
wherein the nuclease agent cleaves the nuclease target site in the target genomic locus, the nucleic acid construct is inserted into the target genomic locus to create a modified target genomic locus, and the lysosomal alpha-glucosidase is expressed from the modified target genomic locus, thereby treating the Pompe disease.

573. The method of any one of claims 570-572, wherein the Pompe disease is infantile-onset Pompe disease.

574. The method of any one of claims 570-572, wherein the Pompe disease is late-onset Pompe disease.

575. The method of any one of claims 554-574, wherein the subject is a human subject.

576. The method of any one of claims 554-575, wherein the subject is a neonatal subject.

577. The method of claim 576, wherein the neonatal subject is a human subject within 24 weeks after birth, optionally wherein the neonatal subject is a human subject within 12 weeks after birth, within 8 weeks after birth, or within 4 weeks after birth.

578. The method of any one of claims 554-575, wherein the subject is not a neonatal subject.

579. The method of any one of claims 554-578, wherein the method results in a therapeutically effective level of circulating lysosomal alpha-glucosidase in the subject.

580. The method of any one of claims 554-579, wherein the method reduces glycogen accumulation in skeletal muscle, heart tissue, or central nervous system tissue in the subject.

581. The method of claim 580, wherein the method reduces glycogen accumulation in skeletal muscle and heart tissue in the subject.

582. The method of claim 581, wherein the method results in reduced glycogen levels in skeletal muscle and heart tissue in the subject comparable to wild type levels at the same age.

583. The method of any one of claims 554-582, wherein the method improves muscle strength in the subject or prevents loss of muscle strength in the subject compared to a control subject.

584. The method of claim 583, wherein the method results in the subject having muscle strength comparable to wild type levels at the same age.

585. A method of preventing or reducing the onset of a sign or symptom of Pompe disease in a subject in need thereof, comprising administering to the subject the composition of any one of claims 434-462,
wherein the lysosomal alpha-glucosidase coding sequence is operably linked to a promoter in the nucleic acid construct and is expressed in the subject, thereby preventing or reducing the onset of a sign or symptom of the Pompe disease in the subject.

586. A method of preventing or reducing the onset of a sign or symptom of Pompe disease in a subject in need thereof, comprising administering to the subject the composition of any one of claims 463-520,
wherein the nuclease agent cleaves the nuclease target site, the nucleic acid construct is inserted into the target genomic locus to create a modified target genomic locus, and the lysosomal alpha-glucosidase is expressed from the modified target genomic locus, thereby preventing or reducing the onset of a sign or symptom of the Pompe disease in the subject.

587. The method of claim 585 or 586, wherein the Pompe disease is infantile-onset Pompe disease.

588. The method of claim 585 or 586, wherein the Pompe disease is late-onset Pompe disease.

589. The method of any one of claims 585-588, wherein the method results in a therapeutically effective level of circulating lysosomal alpha-glucosidase in the subject.

590. The method of any one of claims 585-589, wherein the method prevents or reduces glycogen accumulation in skeletal muscle, heart, or central nervous system tissue in the subject.

591. The method of any one of claims 585-590, wherein the method prevents or reduces glycogen accumulation in skeletal muscle and heart tissue in the subject.

592. The method of any one of claims 585-591, wherein the subject is a human subject.

593. The method of any one of claims 585-592, wherein the subject is a neonatal subject.

594. The method of claim 593, wherein the neonatal subject is a human subject within 24 weeks after birth, optionally wherein the neonatal subject is a human subject within 12 weeks after birth.

595. The method of claim 593, wherein the neonatal subject is a human subject within 8 weeks after birth.

596. The method of claim 593, wherein the neonatal subject is a human subject within 4 weeks after birth.

597. The method of any one of claims 585-592, wherein the subject is not a neonatal subject.

598. The method of any one of claims 554-597, wherein the method results in increased expression of lysosomal alpha-glucosidase in the subject compared to a method comprising administering an episomal expression vector encoding the lysosomal alpha-glucosidase to a control subject.

599. The method of any one of claims 554-598, wherein the method results in increased serum levels of the lysosomal alpha-glucosidase in the subject compared to a method comprising administering an episomal expression vector encoding the lysosomal alpha-glucosidase to a control subject.

600. The method of any one of claims 554-599, wherein the method results in serum levels of the lysosomal alpha-glucosidase in the subject of at least about 1 µg/mL, at least about 2 µg/mL, at least about 3 µg/mL, at least about 4 µg/mL, at least about 5 µg/mL, at least about 6 µg/mL, at least about 7 µg/mL, at least about 8 µg/mL, at least about 9 µg/mL, or at least about 10 µg/mL.

601. The method of any one of claims 554-600, wherein the method results in serum levels of the lysosomal alpha-glucosidase in the subject of at least about 2 µg/mL or at least about 5 µg/mL.

602. The method of any one of claims 554-601, wherein the method results in serum levels of the lysosomal alpha-glucosidase in the subject of between about 2 µg/mL and about 30 µg/mL or between about 2 µg/mL and about 20 µg/mL.

603. The method of any one of claims 554-602, wherein the method results in serum levels of the lysosomal alpha-glucosidase in the subject of between about 5 µg/mL and about 30 µg/mL or between about 5 µg/mL and about 20 µg/mL.

604. The method of any one of claims 554-603, wherein the method achieves lysosomal alpha-glucosidase activity levels of at least about 40% of normal, at least about 45% of normal, at least about 50%, at least about 60%, at least about 70%, at least about 80%, at least about 90%, or 100% of normal.

605. The method of any one of claims 554-604, wherein:
(I) the subject has infantile-onset Pompe disease, and the method achieves lysosomal alpha-glucosidase expression or activity levels of at least about 1% or more than about 1% of normal; or
(II) the subject has late-onset Pompe disease, and the method achieves lysosomal alpha-glucosidase expression or activity levels of at least about 40% of normal or more than about 40% of normal.

606. The method of any one of claims 554-605, wherein the expression or activity of the lysosomal alpha-glucosidase is at least 50% of the expression or activity of the lysosomal alpha-glucosidase at a peak level of expression measured for the subject at 24 weeks after the administering.

607. The method of any one of claims 554-606, wherein the expression or activity of the lysosomal alpha-glucosidase is at least 50% of the expression or activity of the lysosomal alpha-glucosidase at a peak level of expression measured for the subject at one year after the administering.

608. The method of any one of claims 554-607, wherein the expression or activity of the lysosomal alpha-glucosidase is at least 60% of the expression or activity of the lysosomal alpha-glucosidase at a peak level of expression measured for the subject at 24 weeks after the administering.

609. The method of any one of claims 554-608, wherein the expression or activity of the lysosomal alpha-glucosidase is at least 50% of the expression or activity of the lysosomal alpha-glucosidase at a peak level of expression measured for the subject at two years after the administering.

610. The method of any one of claims 554-609, wherein the expression or activity of the lysosomal alpha-glucosidase is at least 60% of the expression or activity of the lysosomal alpha-glucosidase at a peak level of expression measured for the subject at 2 years after the administering.

611. The method of any one of claims 554-610, wherein the expression or activity of the lysosomal alpha-glucosidase is at least 60% of the expression or activity of the lysosomal alpha-glucosidase at a peak level of expression measured for the subject at 24 weeks after the administering.

612. The method of any one of claim 554-611, wherein the method further comprises assessing preexisting AAV immunity in the subject prior to administering the nucleic acid construct to the subject.

613. The method of claim 612, wherein the preexisting AAV immunity is preexisting AAV8 immunity.

614. The method of claim 612 or 613, wherein assessing preexisting AAV immunity comprises assessing immunogenicity using a total antibody immune assay or a neutralizing antibody assay.

615. The method of any one of claims 542-614, wherein the nucleic acid construct is administered simultaneously with the nuclease agent or the one or more nucleic acids encoding the nuclease agent.

616. The method of any one of claims 542-614, wherein the nucleic acid construct is not administered simultaneously with the nuclease agent or the one or more nucleic acids encoding the nuclease agent.

617. The method of claim 616, wherein the nucleic acid construct is administered prior to the nuclease agent or the one or more nucleic acids encoding the nuclease agent.

618. The method of claim 616, wherein the nucleic acid construct is administered after the nuclease agent or the one or more nucleic acids encoding the nuclease agent.

619. A method of inserting a nucleic acid encoding a multidomain therapeutic protein comprising a delivery domain fused to a lysosomal alpha-glucosidase into a target genomic locus in a neonatal cell or a population of neonatal cells, comprising administering to the neonatal cell or the population of neonatal cells:
(a) a nucleic acid construct comprising a coding sequence for the multidomain therapeutic protein comprising the delivery domain fused to the lysosomal alpha-glucosidase, optionally wherein the delivery domain is a CD63-binding delivery domain or a TfR-binding delivery domain; and
(b) a nuclease agent or one or more nucleic acids encoding the nuclease agent, wherein the nuclease agent targets a nuclease target site in the target genomic locus,
wherein the nuclease agent cleaves the nuclease target site, and the nucleic acid construct is inserted into the target genomic locus.

620. A method of inserting a nucleic acid encoding a multidomain therapeutic protein comprising a CD63-binding delivery domain fused to a lysosomal alpha-glucosidase into a target genomic locus in a neonatal cell or a population of neonatal cells, comprising administering to the neonatal cell or the population of neonatal cells:
(a) a nucleic acid construct comprising a coding sequence for the multidomain therapeutic protein comprising the CD63-binding delivery domain fused to the lysosomal alpha-glucosidase; and
(b) a nuclease agent or one or more nucleic acids encoding the nuclease agent, wherein the nuclease agent targets a nuclease target site in the target genomic locus,
wherein the nuclease agent cleaves the nuclease target site, and the nucleic acid construct is inserted into the target genomic locus.

621. A method of expressing a multidomain therapeutic protein comprising a delivery domain fused to a lysosomal alpha-glucosidase from a target genomic locus in a neonatal cell or a population of neonatal cells, comprising administering to the neonatal cell or the population of neonatal cells:
(a) a nucleic acid construct comprising a coding sequence for the multidomain therapeutic protein comprising the delivery domain fused to the lysosomal alpha-glucosidase, optionally wherein the delivery domain is a CD63-binding delivery domain or a TfR-binding delivery domain; and
(b) a nuclease agent or one or more nucleic acids encoding the nuclease agent, wherein the nuclease agent targets a nuclease target site in the target genomic locus,
wherein the nuclease agent cleaves the nuclease target site, the nucleic acid construct is inserted into the target genomic locus to create a modified target genomic locus, and the multidomain therapeutic protein comprising the delivery domain fused to the lysosomal alpha-glucosidase is expressed from the modified target genomic locus.

622. A method of expressing a multidomain therapeutic protein comprising a CD63-binding delivery domain fused to a lysosomal alpha-glucosidase from a target genomic locus in a neonatal cell or a population of neonatal cells, comprising administering to the neonatal cell or the population of neonatal cells:
(a) a nucleic acid construct comprising a coding sequence for the multidomain therapeutic protein comprising the CD63-binding delivery domain fused to the lysosomal alpha-glucosidase; and
(b) a nuclease agent or one or more nucleic acids encoding the nuclease agent, wherein the nuclease agent targets a nuclease target site in the target genomic locus,
wherein the nuclease agent cleaves the nuclease target site, the nucleic acid construct is inserted into the target genomic locus to create a modified target genomic locus, and the multidomain therapeutic protein comprising the CD63-binding delivery domain fused to the lysosomal alpha-glucosidase is expressed from the modified target genomic locus.

623. A method of inserting a nucleic acid encoding a multidomain therapeutic protein comprising a delivery domain fused to a lysosomal alpha-glucosidase into a target genomic locus in a neonatal cell in a neonatal subject, comprising administering to the neonatal subject:
(a) a nucleic acid construct comprising a coding sequence for the multidomain therapeutic protein comprising the delivery domain fused to the lysosomal alpha-glucosidase, optionally wherein the delivery domain is a CD63-binding delivery domain or a TfR-binding delivery domain; and
(b) a nuclease agent or one or more nucleic acids encoding the nuclease agent, wherein the nuclease agent targets a nuclease target site in the target genomic locus,
wherein the nuclease agent cleaves the nuclease target site, and the nucleic acid construct is inserted into the target genomic locus.

624. A method of inserting a nucleic acid encoding a multidomain therapeutic protein comprising a CD63-binding delivery domain fused to a lysosomal alpha-glucosidase into a target genomic locus in a neonatal cell in a neonatal subject, comprising administering to the neonatal subject:
(a) a nucleic acid construct comprising a coding sequence for the multidomain therapeutic protein comprising the CD63-binding delivery domain fused to the lysosomal alpha-glucosidase; and
(b) a nuclease agent or one or more nucleic acids encoding the nuclease agent, wherein the nuclease agent targets a nuclease target site in the target genomic locus,
wherein the nuclease agent cleaves the nuclease target site, and the nucleic acid construct is inserted into the target genomic locus.

625. A method of expressing a multidomain therapeutic protein comprising a delivery domain fused to a lysosomal alpha-glucosidase protein from a target genomic locus in a neonatal cell in a neonatal subject, comprising administering to the neonatal subject:
(a) a nucleic acid construct comprising a coding sequence for the multidomain therapeutic protein comprising the delivery domain fused to the lysosomal alpha-glucosidase, optionally wherein the delivery domain is a CD63-binding delivery domain or a TfR-binding delivery domain; and
(b) a nuclease agent or one or more nucleic acids encoding the nuclease agent, wherein the nuclease agent targets a nuclease target site in the target genomic locus,
wherein the nuclease agent cleaves the nuclease target site, the nucleic acid construct is inserted into the target genomic locus to create a modified target genomic locus, and the multidomain therapeutic protein comprising the delivery domain fused to the lysosomal alpha-glucosidase is expressed from the modified target genomic locus.

626. A method of expressing a multidomain therapeutic protein comprising a CD63-binding delivery domain fused to a lysosomal alpha-glucosidase protein from a target genomic locus in a neonatal cell in a neonatal subject, comprising administering to the neonatal subject:
(a) a nucleic acid construct comprising a coding sequence for the multidomain therapeutic protein comprising the CD63-binding delivery domain fused to the lysosomal alpha-glucosidase; and
(b) a nuclease agent or one or more nucleic acids encoding the nuclease agent, wherein the nuclease agent targets a nuclease target site in the target genomic locus,
wherein the nuclease agent cleaves the nuclease target site, the nucleic acid construct is inserted into the target genomic locus to create a modified target genomic locus, and the multidomain therapeutic protein comprising the CD63-binding delivery domain fused to the lysosomal alpha-glucosidase is expressed from the modified target genomic locus.

627. A method of treating a lysosomal alpha-glucosidase deficiency in a neonatal subject in need thereof, comprising administering to the neonatal subject:
(a) a nucleic acid construct comprising a coding sequence for a multidomain therapeutic protein comprising a delivery domain fused to a lysosomal alpha-glucosidase, optionally wherein the delivery domain is a CD63-binding delivery domain or a TfR-binding delivery domain; and
(b) a nuclease agent or one or more nucleic acids encoding the nuclease agent, wherein the nuclease agent targets a nuclease target site in a target genomic locus,
wherein the nuclease agent cleaves the nuclease target site, the nucleic acid construct is inserted into the target genomic locus to create a modified target genomic locus, and the multidomain therapeutic protein comprising the delivery domain fused to the lysosomal alpha-glucosidase is expressed from the modified target genomic locus.

628. A method of treating a lysosomal alpha-glucosidase deficiency in a neonatal subject in need thereof, comprising administering to the neonatal subject:
(a) a nucleic acid construct comprising a coding sequence for a multidomain therapeutic protein comprising a CD63-binding delivery domain fused to a lysosomal alpha-glucosidase; and
(b) a nuclease agent or one or more nucleic acids encoding the nuclease agent, wherein the nuclease agent targets a nuclease target site in a target genomic locus,
wherein the nuclease agent cleaves the nuclease target site, the nucleic acid construct is inserted into the target genomic locus to create a modified target genomic locus, and the multidomain therapeutic protein comprising the CD63-binding delivery domain fused to the lysosomal alpha-glucosidase is expressed from the modified target genomic locus.

629. A method of reducing glycogen accumulation in a tissue in a neonatal subject in need thereof, comprising administering to the neonatal subject:
(a) a nucleic acid construct comprising a coding sequence for a multidomain therapeutic protein comprising a delivery domain fused a lysosomal alpha-glucosidase, optionally wherein the delivery domain is a CD63-binding delivery domain or a TfR-binding delivery domain; and
(b) a nuclease agent or one or more nucleic acids encoding the nuclease agent, wherein the nuclease agent targets a nuclease target site in a target genomic locus,
wherein the nuclease agent cleaves the nuclease target site, the nucleic acid construct is inserted into the target genomic locus to create a modified target genomic locus, and the multidomain therapeutic protein comprising the delivery domain fused to the lysosomal alpha-glucosidase is expressed from the modified target genomic locus and reduces glycogen accumulation in the tissue.

630. A method of reducing glycogen accumulation in a tissue in a neonatal subject in need thereof, comprising administering to the neonatal subject:
(a) a nucleic acid construct comprising a coding sequence for a multidomain therapeutic protein comprising a CD63-binding delivery domain fused a lysosomal alpha-glucosidase; and
(b) a nuclease agent or one or more nucleic acids encoding the nuclease agent, wherein the nuclease agent targets a nuclease target site in a target genomic locus,
wherein the nuclease agent cleaves the nuclease target site, the nucleic acid construct is inserted into the target genomic locus to create a modified target genomic locus, and the multidomain therapeutic protein comprising the CD63-binding delivery domain fused to the lysosomal alpha-glucosidase is expressed from the modified target genomic locus and reduces glycogen accumulation in the tissue.

631. A method of treating Pompe disease in a neonatal subject in need thereof, comprising administering to the neonatal subject:
(a) a nucleic acid construct comprising a coding sequence for a multidomain therapeutic protein comprising a delivery domain fused to a lysosomal alpha-glucosidase, optionally wherein the delivery domain is a CD63-binding delivery domain or a TfR-binding delivery domain; and
(b) a nuclease agent or one or more nucleic acids encoding the nuclease agent, wherein the nuclease agent targets a nuclease target site in a target genomic locus,
wherein the nuclease agent cleaves the nuclease target site, the nucleic acid construct is inserted into the target genomic locus to create a modified target genomic locus, and the multidomain therapeutic protein comprising the delivery domain fused to the lysosomal alpha-glucosidase is expressed from the modified target genomic locus, thereby treating the Pompe disease.

632. A method of treating Pompe disease in a neonatal subject in need thereof, comprising administering to the neonatal subject:
(a) a nucleic acid construct comprising a coding sequence for a multidomain therapeutic protein comprising a CD63-binding delivery domain fused to a lysosomal alpha-glucosidase; and
(b) a nuclease agent or one or more nucleic acids encoding the nuclease agent, wherein the nuclease agent targets a nuclease target site in a target genomic locus,
wherein the nuclease agent cleaves the nuclease target site, the nucleic acid construct is inserted into the target genomic locus to create a modified target genomic locus, and the multidomain therapeutic protein comprising the CD63-binding delivery domain fused to the lysosomal alpha-glucosidase is expressed from the modified target genomic locus, thereby treating the Pompe disease.

633. A method of preventing or reducing the onset of a sign or symptom of Pompe disease in a neonatal subject in need thereof, comprising administering to the neonatal subject:
(a) a nucleic acid construct comprising a coding sequence for a multidomain therapeutic protein comprising a delivery domain fused to a lysosomal alpha-glucosidase, optionally wherein the delivery domain is a CD63-binding delivery domain or a TfR-binding delivery domain; and
(b) a nuclease agent or one or more nucleic acids encoding the nuclease agent, wherein the nuclease agent targets a nuclease target site in a target genomic locus,
wherein the nuclease agent cleaves the nuclease target site, the nucleic acid construct is inserted into the target genomic locus to create a modified target genomic locus, and the multidomain therapeutic protein comprising the delivery domain fused to the lysosomal alpha-glucosidase is expressed from the modified target genomic locus, thereby preventing or reducing the onset of a sign or symptom of the Pompe disease in the subject.

634. A method of preventing or reducing the onset of a sign or symptom of Pompe disease in a neonatal subject in need thereof, comprising administering to the neonatal subject:
(a) a nucleic acid construct comprising a coding sequence for a multidomain therapeutic protein comprising a CD63-binding delivery domain fused to a lysosomal alpha-glucosidase; and
(b) a nuclease agent or one or more nucleic acids encoding the nuclease agent, wherein the nuclease agent targets a nuclease target site in a target genomic locus,
wherein the nuclease agent cleaves the nuclease target site, the nucleic acid construct is inserted into the target genomic locus to create a modified target genomic locus, and the multidomain therapeutic protein comprising the CD63-binding delivery domain fused to the lysosomal alpha-glucosidase is expressed from the modified target genomic locus, thereby preventing or reducing the onset of a sign or symptom of the Pompe disease in the subject.

635. A neonatal cell or a population of neonatal cells made by the method of any one of claims 619-634.

636. A neonatal cell or a population of neonatal cells comprising a nucleic acid construct inserted into a target genomic locus, wherein the nucleic acid construct comprises a coding sequence for a multidomain therapeutic protein comprising a delivery domain fused to a lysosomal alpha-glucosidase inserted into a target genomic locus, optionally wherein the delivery domain is a CD63-binding delivery domain or a TfR-binding delivery domain.

637. A neonatal cell or a population of neonatal cells comprising a nucleic acid construct inserted into a target genomic locus, wherein the nucleic acid construct comprises a coding sequence for a multidomain therapeutic protein comprising a CD63-binding delivery domain fused to a lysosomal alpha-glucosidase inserted into a target genomic locus.

638. A method of inserting a nucleic acid encoding a multidomain therapeutic protein comprising a TfR-binding delivery domain fused to a lysosomal alpha-glucosidase into a target genomic locus in a neonatal cell or a population of neonatal cells, comprising administering to the neonatal cell or the population of neonatal cells:
(a) a nucleic acid construct comprising a coding sequence for the multidomain therapeutic protein comprising the TfR-binding delivery domain fused to the lysosomal alpha-glucosidase; and
(b) a nuclease agent or one or more nucleic acids encoding the nuclease agent, wherein the nuclease agent targets a nuclease target site in the target genomic locus,
wherein the nuclease agent cleaves the nuclease target site, and the nucleic acid construct is inserted into the target genomic locus.

639. A method of expressing a multidomain therapeutic protein comprising a TfR-binding delivery domain fused to a lysosomal alpha-glucosidase from a target genomic locus in a neonatal cell or a population of neonatal cells, comprising administering to the neonatal cell or the population of neonatal cells:
(a) a nucleic acid construct comprising a coding sequence for the multidomain therapeutic protein comprising the TfR-binding delivery domain fused to the lysosomal alpha-glucosidase; and
(b) a nuclease agent or one or more nucleic acids encoding the nuclease agent, wherein the nuclease agent targets a nuclease target site in the target genomic locus,
wherein the nuclease agent cleaves the nuclease target site, the nucleic acid construct is inserted into the target genomic locus to create a modified target genomic locus, and the multidomain therapeutic protein comprising the TfR-binding delivery domain fused to the lysosomal alpha-glucosidase is expressed from the modified target genomic locus.

640. A method of inserting a nucleic acid encoding a multidomain therapeutic protein comprising a TfR-binding delivery domain fused to a lysosomal alpha-glucosidase into a target genomic locus in a neonatal cell in a neonatal subject, comprising administering to the neonatal subject:
(a) a nucleic acid construct comprising a coding sequence for the multidomain therapeutic protein comprising the TfR-binding delivery domain fused to the lysosomal alpha-glucosidase; and
(b) a nuclease agent or one or more nucleic acids encoding the nuclease agent, wherein the nuclease agent targets a nuclease target site in the target genomic locus,
wherein the nuclease agent cleaves the nuclease target site, and the nucleic acid construct is inserted into the target genomic locus.

641. A method of expressing a multidomain therapeutic protein comprising a TfR-binding delivery domain fused to a lysosomal alpha-glucosidase protein from a target genomic locus in a neonatal cell in a neonatal subject, comprising administering to the neonatal subject:
(a) a nucleic acid construct comprising a coding sequence for the multidomain therapeutic protein comprising the TfR-binding delivery domain fused to the lysosomal alpha-glucosidase; and
(b) a nuclease agent or one or more nucleic acids encoding the nuclease agent, wherein the nuclease agent targets a nuclease target site in a target gene at the target genomic locus,
wherein the nuclease agent cleaves the nuclease target site, the nucleic acid construct is inserted into the target genomic locus to create a modified target genomic locus, and the multidomain therapeutic protein comprising the TfR-binding delivery domain fused to the lysosomal alpha-glucosidase is expressed from the modified target genomic locus.

642. A method of treating a lysosomal alpha-glucosidase deficiency in a neonatal subject in need thereof, comprising administering to the neonatal subject:
(a) a nucleic acid construct comprising a coding sequence for a multidomain therapeutic protein comprising a TfR-binding delivery domain fused to a lysosomal alpha-glucosidase; and
(b) a nuclease agent or one or more nucleic acids encoding the nuclease agent, wherein the nuclease agent targets a nuclease target site in a target genomic locus,
wherein the nuclease agent cleaves the nuclease target site, the nucleic acid construct is inserted into the target genomic locus to create a modified target genomic locus, and the multidomain therapeutic protein comprising the TfR-binding delivery domain fused to the lysosomal alpha-glucosidase is expressed from the modified target genomic locus.

643. A method of reducing glycogen accumulation in a tissue in a neonatal subject in need thereof, comprising administering to the neonatal subject:
(a) a nucleic acid construct comprising a coding sequence for a multidomain therapeutic protein comprising a TfR-binding delivery domain fused to a lysosomal alpha-glucosidase; and
(b) a nuclease agent or one or more nucleic acids encoding the nuclease agent, wherein the nuclease agent targets a nuclease target site in a target genomic locus,
wherein the nuclease agent cleaves the nuclease target site, the nucleic acid construct is inserted into the target genomic locus to create a modified target genomic locus, and the multidomain therapeutic protein comprising the TfR-binding delivery domain fused to the lysosomal alpha-glucosidase is expressed from the modified target genomic locus and reduces glycogen accumulation in the tissue.

644. A method of treating Pompe disease in a neonatal subject in need thereof, comprising administering to the neonatal subject:
(a) a nucleic acid construct comprising a coding sequence for a multidomain therapeutic protein comprising a TfR-binding delivery domain fused to a lysosomal alpha-glucosidase; and
(b) a nuclease agent or one or more nucleic acids encoding the nuclease agent, wherein the nuclease agent targets a nuclease target site in a target genomic locus,
wherein the nuclease agent cleaves the nuclease target site, the nucleic acid construct is inserted into the target genomic locus to create a modified target genomic locus, and the multidomain therapeutic protein comprising the TfR-binding delivery domain fused to the lysosomal alpha-glucosidase is expressed from the modified target genomic locus, thereby treating the Pompe disease.

645. A method of preventing or reducing the onset of a sign or symptom of Pompe disease in a neonatal subject in need thereof, comprising administering to the neonatal subject:
(a) a nucleic acid construct comprising a coding sequence for a multidomain therapeutic protein comprising a TfR-binding delivery domain fused to a lysosomal alpha-glucosidase; and
(b) a nuclease agent or one or more nucleic acids encoding the nuclease agent, wherein the nuclease agent targets a nuclease target site in a target genomic locus,
wherein the nuclease agent cleaves the nuclease target site, the nucleic acid construct is inserted into the target genomic locus to create a modified target genomic locus, and the multidomain therapeutic protein comprising the TfR-binding delivery domain fused to the lysosomal alpha-glucosidase is expressed from the modified target genomic locus, thereby preventing or reducing the onset of a sign or symptom of the Pompe disease in the subject.

646. A neonatal cell or a population of neonatal cells made by the method of any one of claims 638-645.

647. A neonatal cell or a population of neonatal cells comprising a nucleic acid construct inserted into a target genomic locus, wherein the nucleic acid construct comprises a coding sequence for a multidomain therapeutic protein comprising a TfR-binding delivery domain fused to a lysosomal alpha-glucosidase inserted into a target genomic locus.
